United States Patent Application Publication US 2026/0258423 A1 - sequence listing, part 22

SEQ ID NO: 167803 - DNA, 46709983 bp, Homo sapiens (residues 25,023,211-26,691,424 of 46,709,983)
  source 1..46709983: mol_type = genomic DNA
cctggaaggtcatactccaccatttttcctcttaatgtgcatgcttaagccccttcgtcgagctcctgagatcttatcagaaagctgctgatcaccagttttaggtgtttcctatctatagggacagtgcctttcctcggtgctggctgcaatctgttaatattttagagaggcggtgtgacaactgcctgaccatcacctgatggttgcctgattttcttggttgggtgtaggggccctctcctgccctgttggcatctgactagctaccacgtggaacactatgtcaatttaaattcatagactacccaaggaaaataaaaggtaccttgctataacatcaaacttaataatttgctttttaaaattttcatttatttatttattattgatacttaaaacttaatatttgttcatctacatggggttcttgggatattttgttacatgcacagaatgcataattatcaagtcagggtatttgggttatatattacctcaattatttatgatttccatatgttgggaacattttaacttttctagctatttagaaacataaaatacattgttgttaactaatagtcaccctactctgctaccaaatattagattttttttttttgagacggagtctcgttctgtcgcctaggctggagtgccatggagtgatctcagctcactgcaagctctgcctcccgggttcatgccattctcctgactcagcctctggagtaactgggactgtaggcgcccgccaccatgcccggttaattttttgtatttttaagtgtttcaccgtgttagccaggatggtctcgatctcctcacctcgtgatccacctgcttcggcctcccaaagtgctgggattacaggcgttagccaccacgcccggccccaaatattagatcgtattccttctcactgtatgtggtacacattaaacaatggtttttcatccctcccactgctgctctcacactcttactatatctatcattatatttcctacttccatgaaatcaactgcttttgctcccacgtatgagtgagatcatgtgatatttgtcttcctgtgcatctaggcagcttgcttgggtactagtagtggctgcagtgagccaggcaggcgggtgggttcttgggcccttgggaagtggatgtggcaatggtgatggcagtagcagtgatgagacaacccttcggttcccaagaagttcacatttgtgctatcagtgatagtgacaggttgggagggccagtccccaggcctgcaggtggtgcatacaggtgggtgccacgtgtgatggtagcagtaggttggaggtgcctaacctcaggcctctggagaaatgttcaggtgatgaaggtggtggactggactgggtattggagggggtggagcccagcctggtggaactgtcatctggccctctgatggtgtgtgcaggtactggctgtggtaggccaggatggggtgatctgcgaccttggtggaatgcttaggtaggggcagcagtgactatgctttggctttgctactggggagggcagagtagctttcagtggcagtccctgcaagcgggaggaggctggagagtgcatagattgctcgtgcttgtccctggtggtggcagcctgtagtgtcagtggctgagggtaggggagccctttcttggaatgtgtgaaagtgcatagagactccattgttgggggtaccagggtcactaccaatggcttgtacttatgcctcagtgatggcaggagccagcagcaagggaggctgtggcagggtaggctttcttcaaggtgcatgaagatgtggggccctgtaatcaggggacagggtcactatcagtggctcataccttggccccagcagcagcagccagcagtggcagtgactatgcatgggacatgtcaatggtgctccaggatatggaaatgtagtggcttttgggccccagagcatgatgcaatctggtagggggtgggatctcaaaatgttactgtactgtcgctgcttaggactgggaggtgtatgggactcagcatgacctccctctctggagcaacattatcacagctctgttcgtttgttagggctgccataacaaagtattacaacctgggtgacttaaaaaacaaaaatatcttttgtctccatttgggggctagaagtccaagatcaaggtgtcaaaagttctgggtttttttgggcactgtaagaaagttctgttttttggcatggtactgggtcttggtagaaactgaatgcttaactgtgggctgcccatttaccatctgacctgagcccatcatgaactgttatctgacttaccaagccataaagttgagtatgcatagcagcactctcatcaaatggaagtggtgtatatgtgattgggtccaagcaggccctgtagggacaagtaagccatatgaactggtccaaatgcccattgtccccacccctgcttcattgccttctttctcccagcctgcccctatgacatcatgagaacttccctatgaacaatcgatagagaaagaaaattcaggcctggtttacagatggttccacaggatatgaagcaacatgtaaaagcatgcaatgccgcagtacagcttccttcttggacattttgtaaggatggtggtgaagggaaatcctctcaggtgtcagaaatttgagcactgaaattggttgcttacttttcttggaaggagaaataatcaggcatgtaattatttaccaaataatggacctgatgttcaggaacttggaagaaacatgataggaaaattgctgaccaggaaatttgggaaagaggcatgtcaatagacctttcttttttttttttttttttttttttttttttttttttttgagacggagtctcgctctgtggcccaggcgggagtgcagtggtgcaatctcggctcactgcaagctccgcctcccgggttcacgccattctcctgcctcagcctcccgagtagctgggactacaggcgcccgccaccacgcctggctaatttttttgtatttttagtagagacggggtttcaccgtgttagccaggatggtctcgaactcctgacctcgtgatccgcccgcctcggcctcccaaagtgctgggattacaagcgtgagccaccgcgcccggccgtcaatagacctttcttaatgagaaaaaaagatttgaagatggtttgtgtcccatgtgaatgctcaacaaaggataacctcaagggaaggattttaataatcaagtggataagatgacccgttctgtgaataccagtcagcctctttccccagccacccttgttatcacccaatgggctcatgaacaaagtggccatggtggcagagatggaggttatgcatggattctgcaacgggaacttccactcactaaggctgacctagttacagctgctgctgagcgcccaatctgccagtggcagagaccagccctgagaccccgatacagcagcatttcccgggggcatcaacctgatggcaagttgattacattagactgcttccatcgtgaaaggaacagtgtttgttcttgctggaatagacacactcactgttaatatatttgccttccctgcatgtaatgcttttgtattcattgatttacagaatggcttatccaccctcatggtattctacacaacattgcttctgatcaaggaactcacttcatagcaaaactatagtagtgggctcatgctcagggatttaactgatcttatgttccccatgatttttaggtagctggcttgatagaatgatgagatggcctattgaagactcatttatagtaacagctaggtacaataccttacaagacaaggcaagattctacaacagaatatatgtgctctaaatcagccttaaatatatggtactctttctctcacagcaggattcatgggcccaggaatcaaggagtagaaatgggagttgcaccatccactattacccctgaagactgactagcaaaatttgtgcttactgtgcccacaacttaatgctctgctggcctggaggtcttagttccaaagggagggctactgccaccaggaaacacaataattgatccgttgaaatggaagttaagacttccaccctgccacgtcagtcctctgaataacaggcaaaaaaggaaattattgtactggcttcagtgcttgattctgaattccaaggagaaattagactgctactttataatggaagtaaggaggaatatgcctggaatacagcaaaattcatgcagtgtctcttagtattaacatgccttgtgattaaagtcaatgaaaaactgcagcaagcaaatccaagcaggattatgaatggcccatacgtttcaggaataaagatttaggtcaccccaccaggtaacaaaccataatcagctgggttacttgctgaaagcaatgggaatatgagatgggcagtggaagaaagtagttttaaataccagttatgagcatgtaaccagttatagaaacagactgtgattgtcatgaatatgtcttccttgtgttgttatgaagatgcttgtgtttatatatatgtatacacatatttataaacatatatatacacacacatatgtatatacacacacacacacacacacacacaaatggtccctgacttacaatgctttgacatgattttccacttataatttttcaactttacactggcacaaaggtggtacccattcagtagaatccatacttcaagtatctatacaacctttctgcttctcactttcagcacagtattcaataaattacatgagctattaaacattttgttacaaaagaagtatttatgttagaagattttacccaactgtaggctaaggtaagtgttctgagcacatttaaagtaagctagctataacgtttggtagtttatgtgtattaaacgcatttttgacttagaatattttcaatttacaatgggtttatcggaacatatataatctttgtttttttctctcttatccccataggtaacataagatctattaactttatagtatagtatttaagtattgttaaattgacataatagtgtttaagttatgagatatatcagatatgggatatcaagaggaagagtaactatcactcaaggactttgcattcttttgggggaacgagttattccattttcagttgtacataagacagttggatcgtgttaggtggaagtatgacattgttattgtatttatttgtaggttaagtatgctttaaggagattcatatggttgccaagctgaccaggagtggacttgtgatggttaatcttatgtgccaactaggcttggacacagtgcctagacatttgatcaaatattattctaaatgtttatgtgaatatgtttttgaatgaaatcaacatttaaattggtggactttgagtaaagcaaaatgccctccataatgtggatgggcctcatccaatcagctgaaaaccttaagagaacaaatatggacctgtcctgggcaataggaagtctgtcaacagatgacctatggacttgaacttcaacctcacctcttccctgatctccagcatgtgggcctaccctgcagattttgaacttgccagcttccctaatccatgtgccaattccttcaaataaaataaatctttctctcttcctccctctccctctccacacacaccacccccccacacacacacatcctatttgttctgtttatctgtaaaccctaatatgataaggtatgattccctttaagaagttctacaacagagaaaactaacttatggtgatagaaatgagaataggggttgtttctgaaagggtgggaattgatgagaaaggggctaagaaggagattttgagattagagaaattatatatatatatatatatatatatatatatatatatatgaatgtgagttacatatctgtatgcatttgtcaaaatcaatcaagctgaatacttaagagctctgcattttaccatatgtattaattaaccaaacctcatgtcttaaaaaaggagaaaagacataggtgttgccattgtagatttggagaaatattatgcaaaattttataacataaattcttcataatataatgttacttattaaaagactgtacaattatatataaccttctacttgtactacaaacaaaagtgtgtgcataaaaacattgaaaagagaaacacaaaaatagtaatgatctttattgatgggaatgtagataattttaattttgttcttgatatttacttatgctatttcattttccaaaaatgaatatgtattatttttataatcagaaataatcaatgaaaggtttttaaagaataatttttatagcatatatcttgcttttactaaaattgcattgtattagttttctattgctgccataacaaatggtcataaggttaataacttaaaccagtagtcatttagtatctgagagttctgtaggtcagaagcctgggttagctcaactagttcctctgctttgggttttacagtgctgaaatcaagacgtcaaccagctggtcttttttcgggaggatctgagaaaaatctgctttcaagtccatttaggtaattaatataatttggttttctgtcgttatagaaagaagttacagtttctttgctggctgtctggcttttcatttctagagaggtgccttcctcaaagtcttttcaattgcacaatttgggataaggtgtttcttggtggaatcttgtctgattaatcaggagattctccttttgtgtctatataatttatatatcatttatatgtatataaattatgtgcacagttccttccttccttctttcctttcttccttcctccctccctccctccttcttccttccttccttgcttccttccttttttccttccttctttttttcctttctttatattaaatctgaggctctctttggttttacattttccttagatactgacaaaacaactaaaaagtgcctgtatctacattgtggtgttgtatgtatgtgtatgtttgttatcaagataaacgtttgattttgactgcatgaattttagaaatatttagacaacaagcactatattaaacataacaaaaatatttttaaaaatctaaagcaagaaacaaatgacttcagaatgtaaaccttcttaaattaatatgtaaatttagggctatgctaataaaaacagtatcaagtttgaatgggttgtgctgttgtttaggttttttgtgtgtttgtttgcattgcttttcaaaatcaaccagaagttatttaggtaaatattaaaataattgtcctgatttctgacaagagcttctagcatacagaaatagtcttgattatttcaaatgcctctatgtatgtaaaactttggtgatggtttaaataacggtcgaacttatatttatcaaaatacaatatttacagtatttcattctaggagttgcagtgatgtaaaaatgatgtattcataacagatatctaaataaatctttatttaaaaatacaatcttagaaattatgctgtacctagttaaataagagcaattttaacatcaattaaataacagtagctaaaccaaaaagagatatatcaaaattactttacaatgacaaggcagatattctgctgtggttgtgggtgttcaggactccgatgctatagaagctgagccaaatttgcgggtgaccctcagtccctgaggcctcaatgcatgactctccctgggggaccttatgactcaacggacaccctggcatctctaggcctctataagctgcatgtggagcagcagaaacaaaagggtcctttgggaaaaactggaacttgaacttaatattagcctttatttgcctgttgtgatcattttcttttctgagtccatggagctttctctcagtcaacagagcagccatccaactttcttaagctcttttctcaaatcagagtctcatttcaatgggagaaagaagcactccataattatttgtcattgtttttagccaccttcttgtaaaagttttgtacctgatatgtggagttcatgtttctacacactttgggaaattccttctctatttctaagcagttcactgattttctctaaagttgtattacattttctagctgaagcttccaaatttccctttcaagctgcacattttcagactgcaaagatgcctgctcagtttggagactttctacttatcctgtaagctcttcattcatttgattttcttcacaccgttttctgaatctttcctgtttttctccttaaataggtcattttaagtgacctatttaagttaacatccacagtaagactctttagatcaagttctgactgataggccagtgattaccattttcttcctccctcattttctctacttccaggttcccaccatccttgtgatcgctacagaaattgggcaactgtatggtcttcagcaggattcagccagaaattttaattagctccctttatctttcatgacctcttgtgtctgaatgctccaacagtgctatttgttccattttgtttctcattgcacagtttcttagttgagtggttctggactttgctgaagatgagagttttcattcaagctgtcttgtatttgattccaaagttgttctccgtcattctgtgatgtcttccagatgttccacattgatcactagggaaagttttcgtgagttgcttttctgctcttttcccaaatttatggtgtcttcaagtcatgacctgcttccattttttttaatgtcaacaaacacggcgtttgtgacatcagaagactggcttccaccacagcacgcctagatttgttaaacttatgagagcaagagagatttccaccttgagaaatgccaatagtgtcttaaaaggaaaaatataaaacaggacatttattaagtttggggcatggctttgagcaatttaaggaaagtttttcaaggtaggaaactggttggatctgaaaaatttcacatgatagagttgaagactggtaagcatggccagttaagggtctcaggggagttttgataaacgaaccattatcttaaaaagacagctcttttcccagatgagcaaactgtatgcttgaataatttggttaacaagaattttctaaagcagtgacattatttacttgcttgccatctgatattccagcatttgagtttcctggatcagatagttattatgatgaaaggtagtcttggttctcagtctccatccaacttagatgcttgagtagcctcattgcaaactatactcattctgcttctctgtgaacttcagctgtcttgcattcatgacaatttgcccatcggtcagatatacccaatttcctgagtcatctctccaatggtacattagatgttcttttttttgtggataaacacctcaaaaaacaattttggcgctttgagatagtgatatacaaatttatttctcgtaaacaatggcttgggattttctaaaatatatttctagtttatattgaaatgttgcatttcaagcttactgaaaagaagagtataacctcataacatgacaatttgtaattgactatttgaaaagtttgaaatagtttattgttaaaaaactgccattggctaactcatgagaaagtgcatgtgcctttcagattctaacaggagtgaactaaatcttataaacttatttggcttccatgtgctgctttagaaaaatgctaactatgccttcctctttaattcaagtaatttcacttttgggtctatgccacttcttaaaaaaaaggtgaataaaaacagagcgtagatgatgagggcagaatatgatgcaagctaccaatttgaaaggcagtgaatgaaatctaattttaaaatgcaaaatcaagcaagagccaagaaaagaaaattgcttttatttttctatatccttagcaagttagtgattactgaatatttaatgcatcaacctgactaccataggatatcttgagagcaaacataacatcttaagttacagagtcccaagtaacttttgcatcaagaacccctagatttcattataagcataaagcacagatgtattatgaatattctttattgtaacacattctcaaactgtaagcatctaatgtctaattataggttactaaattttatctgtaacatataagtgaattaatattcttatagaataaaaaaattgaattggaaaactttggagtcttcttaaattaaatttacttccatgttatcatctctttaacttatattatcttagcatttctatatttggatcaaacctcctatcatatacttactgattaattatgttaaaattatttcttcatagtttcaagtatatattctttattcctctagttaggtttgaaactcttcaatagttggaatcatgtcctctgttgcccatttttcctccacactaaacgctatgatttaaatgttggttcccctccaaattaatgttttaatctatttgccactgtggcagagttagaggtgggactttgtggaggtgattggacaatgaaggctttgcctcatgggagggattaatgtcattatattgactctcttttccctctttgcctttctaccttttgccatatgataattcagcaagaaggcctagacaagatgccagcactttgatattgaacttgccagccttcagaaccctgagacaatacatttctgttcgttataaattactcaatatttagtattctgttatagcagcacaaaatgaactaagccactgaatactacatacccattattataaatgactcctaagggatcaacctatcctttaaaaatcctgaaaaagtgagttaatagattggaattctatacttttcacaccattcatcactgccttgccataggatcactctaagggctcttgccacaggaaaattatctttttattttattttattattattatactttaagttttagggtacatgtgcacaatgtgcaggctagttacatatgtatacatgtgccatgctgctgtgctgcacccattaacttgtcatttagcattaggtatatctcctaatgctatccctcccccctccccccaccccacaacagtccccagagtgtgatgttccccttcctgtgtccatctgttctcattgttcaattcccacctatgagtgagaacatgcggtgtttggttttttgttcttgcgatagtttactgagaatgatgatttccagtttcatccatgtccctacaaaggacatgaactcatcattttttatggctgcatagtattccatggtgtatatgtgccacattttcttaatgcagtctatcattgttggacatttgggttggttccaagtctttgctattgtgaattgtgaatagtgccacaataaacatacgtgtgcatgtgtctttatagcagcatgatttatagtcctttgggtatatacccagtaatgggatggctgagtcaaatggtatttctagtgctagatccctgaggaatcaccacactgacttccacaatggttgaactagtttacagtcccaccaacagtgtaaaagtgttcctatttctccacatcctctccagcaccagttgtttcctgactttttaatgattgtcattctaactggtgtgagatggtatctcattgtggttttgatttgcatttctctgatggccagtgatgatgagcattttttcatgtgtcttttggctgcatacatgtcttcttttgagaagtgtctgttcgtatcctttgcccactttttgatggggttgtttgtttttttcttgtaaatttgtttgagttcattgtagattctggatattagccctttgtcagatgagtaggttgtgaaaattttctcccattttgtaggttgcctgttcactctgatggtagtttcttttgctgtacagaagctctttagtttaattagatcctatttgtcaattttgtcttttgttgccattgcttttggtgttttagacatgaagtccttgcccatgcctatgtcctgaatggtattacctaggttttcttctagggtttttatggttttaggtctaacgtttaagtctttaatccctcttgtattaatttttgtataaggtgtaaggaagggatccactttcagctttctacatatggctagccagttttcccagcaccatttattaaatagggaatcctttccccattgcttgtttttctcaggtttgtcaaagatcagatagttgtagatatgcggcgttatcttacatcaacattgtaaatttttatcttggacctaaggtctaccaagatgtttatgcatcctggaaaatggagaaaaatacagaattataagttttcacaaaacaaaaatattaaacataaaaagttgtgctttatcctgagattatatttatcaaatgctaatttttagatggtatttaccaatatggcagctaatgtctatgccaatcggccaattagtacaagtactatatcagttgtttaatatttttaatacaacccagggaattaattatggttttatatattaagattctccttttatatgaaatggtggcaataaagtttagttattttatattcacttttctttaagatagatgtagctgaaaaacaacatcgacaaccctatgtcagtcttctctctttaaagtataaaagtaattttataacccagtgatgtccaaaagcctgggaaagagacaaaactgctcattttaactccatgagattccttgtgtttaaaagtaatttttttttatttctcagcttccaaaattttatttgacagcctccatgtttgcatatagtatcctaaaaacagaaaaatttctagcttaactcccttgcaaagtcttaaatggctataatttgaaataggaattatgccatcaaatatgaagaaaagaagtacggcaactaaaaataaactctgtctgaaactttacactttatggatcctactttatatgtaatatcaaaaaatcataatagtgagatacgtgaagtgtatgttaatttatgccttctggtatacataagcataatatttttcagtatggggaatataaattttaaaattataaaatcttaaaatgaggtaagacctttacatcatctagcctaatcccatgaagttcaaccacgatgcctgtatttatttccctgaccatattatttctgctaaaccatacgtaatactaaaatgttcaccacctcacatagcttcctattgctgctatggagagccttcactgttctaaaaatctatctaaaattgaatttgagtttttatctattaatgacattttgatctccagtttatctttatagccatacagactgcatagttatttttctcaaacataataacattttaaagccttaaaatattaataggtctctcataaaggttaaggtcttttagaaaacctaacaccaaaaatttcaagcccccacccagcacaaagttagttagttagttactgaggttttgtatcataaaccccaaactatagaaggtgctctcttgaagttgtttaaattgtccattttgcctgcaaaactcaaaaccatagactttcttgttcttaggctgtatacttttgggaagtgatactggaacatttgccttgccttatacatcacattcttgttctcttgtttcttttaactgatgacaaacccagctgcctttaacacatacaacctctgctaactgccagaaagcagagggtctcactctcaggatactttaaacacattagcgtttgccttcagtatagatctctattttcttcagctatccctaatgggttatcactcaattttggataccataatacctgagacaaaagacattgtgttacctcagctaaagaatttctatcaaaaaggtctatttttaacagaaggtctgctttttttctaaccttattattcctttatcgccctcttacatagatggtattattaggcaaaattatccataggtcatggaaaaaaagaaggcctgctcttcttttgcttcatttgtggaaatggctcttcatttctaaacccaagattctcaggctttatgttatagttacatttatgtggcaacttggttatgctgtggtgtccatttgctggtcaaccatttcgactatttaaaggtagcaaaaatggaggcagcaacactcacggattggcaaagcaaggaagccattccttccctaagactgaaagggcaagaaaggaatgcatggcagcagctccaggtgctagagaacatatcagggctttccaaaatcctgtgcagaagagggggtgagcaagagaagagataccctgccctctctccccttctatcatccactttctgcaagtacttccccctagctaagtctaactggaagccagaaagacagcatctacatgaaccattctcctgaggcacagagcaggaagtgaggagcagggaatggaaaagaatcagcatgtgaccctcactgtaaattacaccaaaaacatttggatgcatctgtcaaggtttatgaagaatgtctgtacctttaaaggctgaatattgtgtttcactcaacatgtcacctctctgggtcctcttcttctatggttaaaaaaaaaatactgtaataggatttctaattctcccttcttgctacacttaaactctgagagaagaagaaaaagtaatgaataagaaataaatattatgcccctcactccccactctttggaaagtttaagtggatgccatcaattttaattttaaatatccttcctccattggacagattaatggaggaaatagagtagaaacataatgaggtgaagcccagatatctgtgcgaatgtacccaaatattaacactcagtgagctactatttggtatttttaattaaaaaaataagttaatgaaaagtgagcgtatactatatagaattgctgattagctgaatgagcagagcatcctggcctttctgtcaaaaggcacttattacttggtgtccctattttagcctagaatgttctaaagagtgacagtaaatcatatgttatgctgtgattgctagctcactattttttacaggcatattatttggggtgataaaaactaatagaacaaagagaagctgatttcccacttacctagcagttactaagcaaaggatgaattcctttatgtggagattcatcaacccagattctttccattttgtggctctgtaccctttagggtctatctgtcatttgcatctagtgagtacaaagaaatacagatcttttggggtaggaagcatactttcttcctacaagagtcgatacagaaacggcatgcattgctttcatgcacattccattctctgcaatttagtcatatgtccaaacccaaatgcaaagaagaccaagaaagtaggctggctgtgtgccccaaaagagaaaattgacttttgctaaatagctctatcacatacatagggattatgaaaataaacatgtatacatttaatgatgtctaaataactcctgatgcttaaagttaatattatgacaacgtaaaatattacaggataagtaagcctttcatttctatgtatcttaatgtaaaatattcatgtttaattagtgtagactgagcacaaataatgtgtctttgctttaaattttagggaaacaagaggggcaaaatattctaccatatgttattttcccatttaaatttctcaaaggaaaggtaggctatggtataatggttacaattataataagaaatagaagagaatattaaaaaacaatactttaatttctgcctgtctaaataaaatagctgtctgctagtgcttctgaaaatctatataaaaatttccctattaatgatgagacatcttcaatagtttaattggaaataattaaatttccctaagaaaaaggacagattgaaatagccaagtgctgtaacgatcaaattggtaaccaattaattattttttacatgtgccctgcttcttgtttaagtaccatcagtaagttaacacaaaattcagttaagttttgtttttttcactcaatcaatttctacacagcttttctaggttgggtattgtgctatttggtgttgatagagttattaacaagataatcaaagacttacattctagcagcattaatgaacttttactatgtgctcattcattgcaaaaaatgatcatacagaataagtattattatctccattttacaataaggacatttagactcagggagaggttaagtaatgtgtctaatgccttgtggtttgtgagagtggagttgaaccaaaccccaagtatctcatcttatccctctgctgcatgtaactagaactgaattccatatgaaacaagctcttcctgaaaatttaagtcagtgagactttctcactgcttagtttactttctctaatttttaattgatatttcctcttacaatattcaaaaattgggtttcattatatatgtagtctcacttccagtttctaataatactgtgtttttctaacatggaagatttttttttctaaagcaattgctgactttttgataatgagtcaacagtgccatcttctgtctctgttctcatcagccactggaaataaagccttaaaagactgggttaatgtagatcaggaacaggaagcaaggaatctggagagtttacaatcttggcaaaatgtactacatctttgaacacttgcaaagagactaattgtttgaaaggctcgcagggcagagacgtgttaaaaacagtgcagtgtgattagtttcctgaaacctttgagtagcccttccaacaatggaaccgaagaaggaggaagcaggagggaggagacaatgacagaaacaggtggcaagaggttgtaatgatttgggacgccgtaattgatggaataaaataagcaactctcctgtttgttctaccaattgtttacacatttcctcctgtcttcacctttagagaaacatgactgatcttggtaagcacttttatcaagcaaaaaaaaaataaaaaggaaaagatacaaatgaaacaaaatattaagccctgaattttttccttctctgcatgtgaagcatagttatcaaaactgaggcatgtgagaaaacttagataaacatgaaaatcttgcaggattgaacatgtagctgagaaaacactatttttttttttttttgcaaatctatcctattttggaaatgtatttttagtctcatcatactttccagccatcttgcaaagtaaaaaagatgaaaattaaaaactcaaagggtttaccagtacttaggtgagttcatttgagtatctccatttcacaatgcttatctttcatatacctacgctgggtttaagctttctgaatagtagccacttcgagaaatatttatgacgttaatcatattgcccagaatacaattgttcttctgaggaatttgaagaaatggtaggaatcccaaacagattttcgaagttctcttagacaaggaactccaaacagcagcaaggcaaaagtatgaatgaaaggtagttttaatgcctgtctttataagtgtggcttttgtgaggctgctgttttccataattattttgcatacttgaagacgaagcatgaacggcagctacgagtgggcacaatacaatgtgtaactggaaaattttctgtgtaccaccaagggaaaactgccactttacttttgctgaattattggcaatctacttctttgtgcccatctgcttttttcagcctttcattaaaatagtattagatgagttttcttactataaattagtggtcagtgctggacaaaggggattggaattggagttttctgaaatttaaccaaacaccttaacaagatgtctccaaaaaagccaagtatctaaggtttgatgggttaccaggcttgcaaaggatcttccatctgtttctgagggcttcacatgacagtccctgacttatgttccctaacagcccactctatttcacactagccagaggtattatactttaattgtatcatattaaacacactctagaaaacccagaattccatgttaattcgtcagtcaacacaagaaacttagcttcctaaattggcatatctatatttaaagatcatcaatgtcaacattttactatttctctaagcagggcagttatcatgtaatttcataagcatgaagtaataaaattgatctgaaaatgcatatacatatttattctcccttttacaaaactagaatgctttctacaattgttttttaataaagtcattttcaaaatatacacaatgcaaatcattatggggatcttccttctctattgcctccctctggttgtggataaaaactggtttcctgggcaagagcaaaggcagagaccaggctgaatcaaaggagctgcaattgctatgaattctccaaatctccttacacagatgctcagaaggatgagattctgccattttgtacccgaacattcctcccagcctgtgatgctgaaagattaaagactccacgagtacacacaacatgactgattgattacactgacttcagtgcaactcactgggagaagcacgaggcttgagctttaaccagaagctctctcaagcacatggcaatctttctatatccaagggaggctttctttttaatttcataaactcacttttatttatggcacagaccccttctagacccctcctcaggactttttacaaagggtgcccattagaccacttatatcatctcctctagttgctgtttattctatttgcatttgtttttctcatttaactgtaatcaccttatggtaagggtgttggtggtggtacaaggagtggcattgacacaactccagccttaggtgacacctgacttttactaacttaatttcccttgtggtcttacttaattcatcttactccagtggtcaaaagaatgataaaatttccataattctgcttgtgtccaatctctctctctttctcttcctctatctctccccctctctctccctctctttctctttcttttttctctcccctgggtccatttatttctctttttaaaatcagtaattaccaaagtacctctgaaatttactaattaacttcatttctgataactaagcttgataacttttcttctttctataaaataaacttatcctctgatacatacaacccaattaaatgttgactttctcagttgtagagctatcgatttcctaagattaaagtagtcttcctcattgaaattttagaaaagtccaaggcaataatatgaggacaaagagggagttgccattgtctgattaaagtcaacggaatagataaatgtgtcaaaaagaacaagtggcataacggatcataagtatagcaaatccacaacttattatgaattgtctgatgtacatagttttgaacttttcttttaaatcttttttaaattaagtcatttaactatgtatttgaagacaatgtttctccacctttaaactgcctcaaaatctttctaaggacacccactagggacttctcttaatgcatatactgagttttttaaagatgatatctctaccagcaagcagactgatggcttgcgtgtgttaaatactctattaggttatggtgcatacatgctgcatacatgtaatcctaacaaaaagcctgtgaggtattaaaaggtttctttatgtacaaagaaaagatactcctgagtattatgatccaggcagcgaggccaagctcttttccagtgtcttccaaagaggatgtagcatggttgaaattcaagatcaggtgtgttcgccctgactaccgtgttccctcacatgaataaaaatgatctgtagggagatactaattctccttttcaataacctttttctttaaaccatttttctttttcaataaacataactaacataagagtgctcgtaatctttcctcagaaatcgagtttatattttccatttatccctgcattaactaaggttttaaaggtaatgaattcagaatttatttgaataacatagtttcaatagaagcactaacagcagaagcccaggggcttacagacaacataaccaggttgaacatttctcctatcttttcttccgatttatcacaaaatatttacatataattagtttgttgtatgtacatttaattattgtgtcatgtgtttttacaggtaatttatttatctatgcattagtttgctcgggcttccatgacaaaatattgcagactgggtggcttaaccaacaggaatttataattctagaggctggaagtctgagatgaaggtgttggaagggctggtttctgctgagtccctctccttggtttgcggatgactgtgccgttgctgcctcttctcatggtttttcctctgtgcacacacacttctgatgtctctgtgtgtgtccaaatctcttcttgggagaacaccagtcagtttggtttagggccctccctagtaatctcattttaacataattatctctttaaaggccctgcctctaaatactggcacattctcaggtactgggggattatggcttcaacatatgaattttcaggggacacaatttagcccatcacagtctgtataattgaaaagctatagcacagaatattgaattgctatttgtgtaaagaaaaaaggtcccactgtagacatggaaacagttcaaacaaagggggacaggagtagataggagtggattaaaagaagatatgttattttctcatggcagagaatatgttgactgccttagaaacataaacaaaatatgagaaatattttattctaatacaacaatgagcaaaactgtacttaagccagacggctggaattagggattcaggaaataagcattgcaattatatgtcaatcaagtgataaacttaaaaccctgcagtgtcagttaagaagaaagattattagatttatcaaaacaccacagtggaatacaggaaatatagcccaaatgacaaagagaatatttgcaggaactaagaataatcattttaaaggaaaataggttgaaattaagtcaagaatgttgaacaatgatcataataaaaacaactctgaaagcctgttagaaacctattgcctctggctccttagaatatttaagaatttgatgtccagaaacagtcatggccctttcaggaatataatgtcggtttataatgaaattttcaaaaattcataaaagattcacaagtctaaaaagaacaatgcagatcctcagagattcttacatttaaataaatgtagaacatttatgtatactgcaggacagaacttgacatattataaagaattttcaaagagcaaataattagttttgtcttgaaaaatgtaagattttaaaatggtatggtatctttaaaaatctgatagttcacctataaaaaaatgttgctagaaaagattggtatcagggtgggcacaacttataggcaggagaatattttcttatttctggaaaagaatcagcatagaaggtgctttacatatttctttaaattcaagataaatgataccaaatgtggaacagatgctattttggagacaggaatacatatgatattaacaaagagaaattaaacagcaaaagcaattcataaatagtgacacataaagatgggtactacattgcaaaattcaaaggagtatgacgtggagaaatgagaactataaattgtcagcctcacaggatttgaatagtcttttacatatatcagaaagagaattcaagtttttatgtcataaaattcagggaacagttagtttgttaactcagtggcttgattgggtatagatacagtcttggaaaataactctcatgacagtgcagattgaggagatgctggcagccagaaactatgttatagcacagtgaagagtttatgagcatctaaatagaaaattgggcagagccaatggagtggaagagatggatatatctgacccgctagagtagtgagtgtcatggttatgaatgacactccaagatgtggaacatggaagaattgcagacaattttgtgatttctaactgagatgctaagcagatgttgatgctattaatctaggaaagcaggaaataaatacaaagtaaagggcaagtcagattgcaagactgaagagaggagaagcaggaaaaaatataatatgaaaatacaatatgagtaaggatttgcacatagtgagcctaaagttctagttcaaattgagatagaaaagtctaggagctaatgagaaaatgagtatactcattattaccatttcctttcacacttctgataggattatgcttatcatatactgtacattatttttctgatcctgttggccttgctcgttgataatcctctcatctatatacctcatctctcgcttctcatcttcagatagcaaaaaataagtacaaaatacatacacacttttaggtgaggaagtgtttgtcaaattaaattaaagaattcggctttcactttctcattgaaaaatacacttctataaatggaatggctttaagtatttattcatagctatgcattcatcctgcaatgcttcaactagaaaaaaggaagaagaaaatgaaaagggcctaggatattagtatcctgttgaaataaaagtaaaacttcaatttctttcctgtctaatggaacactttttgtctccagtgaatggcagaccaggcagccttgtcattgtagaagtaaaagggacgtgagtggcttcagcctgggatagtgatgtaaaaggagataattaaaaagagagatttgattatgtgaaaccaaaaaaaaatgctcactctcttaacatactttttgtgcaaatgtgttccactccctatggggactgactgaaattaaacagtgattctttgggagcaaggaggatcttctacttaaacagaatccttatcaagatcaccccgggatttgaccgagatggtcaggaacagaccttcatcagagaaggtgtataaagaccagtatgaagtgcccagtggaatccgaacagatgaataactcacttaaaatatctgttaaaaggaaacttccagaatcttgggggaaaaaaatcccatttaaatagcttttaatcacccctgagcatccatgatatgctttctctgaggagcacaggtatttggcctctctgggagactgcattgccttcctggtagagtttttatttttttatttattttacttatttattatttcgtctaggtttggagagtcatctttaaatttctatggagatgttattctcccttgctgagaaaagatattgagagttacagaaactgatgttatactgtcgatttggaagcaagtatgttcaaaaatatgcatttgatattctggaaggtatgacttgaggaagcttcaggggtcttaacttcacatttgcaccaatattttgagcagaggaggagaaagaaacaaaatagaaccagtattcttaccccaaccagtattattcagtagaacctgagtaactcactgtgaaattctattgggaggactggacttggctgcttcaaaaaggaaaatcatggagtcagatagatgggataaacaagttgtgtgagacaaacagacatgattgcatggtccctagtaaagagaactctagtgaatttgctgctacaaacaaaaagagacagagaaaaattatttcctttatatttcagtcaataactactccatcaaccaaaaagcccacagcttttgctgcaaacctcagtgacatgttgaccttcagcttctcccactgggatgcacaataatttttgtttgaaaaattgactttcccatgatgaaagaaaagtgagaaaagaattgttttattcacctgagcaaaaccagcataacatttcagacctttgtcttttttgtgaaactcaccactccattaagattgatcatgtctatgaggctaaaagttatagtcaagagcttctaatttatgaaaagaatagcagacctttctttttaaagtgatcattttcaacacgaactaaatttaaaatagtatgtatttggatttggtaacttattattcttacttttgtatttaaaatatcctgtaaattactaaactctataacatgcatatcatcagtaactaaattgttttgaaattctggcatcagtttagaagaaatttctgcatttataggaggtgttaacatctgtaaagtttaaaaataaatataactcaagatttcatactaaaaaatgtattttcaaaatttacatttttttaaaataactcgtgacagtttttttacagaacttggtaattttgcttctaccacatctccaggctcactttgcatccagcaccttccttgatcaccagtcaaactttcatctttctgtttctggagttcaccaagctctttcccaattgaggttacttatatatgtatatgttttgcctgggctattcttcaccacactgttcatgtggctaattcttttattatctttaaaggtcaccttaaatgacaggaatgtgttacctttcctggctccaaatccaaaattaggtcttatccctttattacatttacccatagattttcttgatagcacagggaaatagagttttattcatccttgtatccccagcacctatcatattatatagtaggcacccaggaaatattcattgcatgaattaagtagagatggtctgtgctttcaaagaactttcagtcttcataatgaatataaataataaaaatattaaattaaattgcattataaatgttatattaggaaatacatataggatgctttctaacctgtacttagagtaaaattcaaagtggaatctaaaggataaatatgaatcaaccaaaaaagaagggtaggttttcatctacttgtatctaatagatacatttttgtattgaaaaaaatgtttcaggtagatatattttatccaaaattgcttcaggcaaatagagatacaaagggccaatggagaattatctcaacatggttaagcctagtggacatcactgtcctgcctaagataaagactgtcactgaagaccctgcttatctttaacattgtccattttgtagtgccatcaggaggtattaaagaaaaccctcagggtacagagtaacaacaaccatatatgcttgtaccagctacttcttgtcagtaactaaaagaaaaatattgtatattgttttatagagtgcttaaatgacatttacctacacaaatatcaaattgcaaacactttgtgcttcaaaacttatttataagttttgtttatatattatttataacctcggtatgatttaaaccatataacaaaatagcaagagaggaaaagagaactacaaaagaactgcaagacagacagaaaataatgaacaaaatggaaatagtaagtccttccattggaggaacacatagactgaaagtgaaggtatggaaaagatgtctcatgcaaacggttacctaaacagagaagaagtagctgtccttagacaaaatcaacattaaatcaaaaactgtcacaggagacaagtacattatgtaatgactagagggtcaatcactccagaaaatacaacaattaaaaatatatatgcacagaacatcagagtgcctaatatctagagcaaactttgacagacctgaagaaataaataggcattaataccagaatatttggacacttcaataccccacttccaataagggatagaaagtccagaaataaagtcaataaggaaataacaggcttgaacaatactatagaccagggacccccaatccctgggccacagaccagtgttggtccatgtcctgttaggaactgggccacactgcaggaggtgagctgtgggacaggtagcattacagcctgagctctgcctctgtcagatcagcagtggcattagattctcacagggaatgaaccatattgtgaactgcacatggtagggatctaggttctgtacttctcgtgagaatcagaaaccacccccgaccctcccttcgcatggaaaagctgtcttacatgaaaccagtctctggtccaaaaaggctgggcactgctactgtaaacccaatgaaactaatagacatatagagaacattccacccaacagcaacagaatatacattcttccaacgtgcacatggaaaattttccaggatacatcaaatgataggtcacaaaaacaacccttagcaaatttaagaacattgaaatcttactaagtaccttttctgactacaatagaattaaactacaaataaatatcagaagaaaagccagaaaagtcacaaatatttgggaaatttaaaaacacacttttgagtaaccaattggtaaaagaaaatcaaaagtgctattagaaactattttcagcaaacaaaaatataagcacaacatagcaaaacttatggtacacaacaaaagcagtactgggagaacattttatagcaataaatgtgtacaataatacagaataaagacctcaataaacaacctaactttccatctcaacaaactagaaatagaagaacaagctaagctcaaaagtagcagaagaaagtaaataataaatgttagaggagcaataagcgaaatagagactaggaaaaaatagaaaaaaatagtgaaactaaaaattgtaattttaaaaagatccaaaaattgacaaaccattagctaaactaagaaaaaagagagaatgctcagataaataagatcagaaatgaaagaggaaccattataaatgatgccaaagaaatacaaagggtaagaaaagacttaatgaataattatacaccaacaaaccagataatctagagaaaatagataatccctataaatatacaacttatcacaactgaaccatgaaaaaaacagaatatctgaaaaggcctataactataacaaaattcaatctgtaagtacaacctctcacaaagaaaagcccgggaagagatggctgcaatgtagaaatctacaaagcatttaaagacttaatgtcaatcattttcaatttcttcaaaaaagattcaagagaaaacatttacaaatttattttatgagtccagcattactttgattctaaagtcagacaaagacacttcaaggaaagaaagctacaggcaaatatgcctgatgaatgtagatgcacaaaccctcaacaaaatactagcaaacttaatttaacagcacattgaaacaatcatacacaatgaccaagtgatatttatctctgggatccaaggatggatcaatatacacaaatcaataatgtgatttactacattaacagactgaggaataaaaatcatatcctttagtcaatagatgcagaaaaagaatttgacaaaattcaacaatcactcatggtgaaaaccaaatcagatatagaaggaacgtgccctaacttcataaaggcccatatctgacaagcccacagttaacatcatactcagtgataaaaaaacaaaaacttttcctgtaagatcaagagcaagacaaggatgcccagtctcgccacttttattcaacatagtacaggaagtcctggttggaataattaggcaagaaaaagaaacaacagacacccaaatcaggaagaaacaagcaaaattatctctgtttacagatgacaggaattcatatgtagaaaaccataaagaatttcccccaaaaaaccctattagaactaataagcaaattcagtaaaattgcagaatacaaaatccacatatgaaataatcagttgcatttctatacactaataatgaactatccaaaagaaaattttttaaaaaatctcatttacaatggaatcaaaaagaaaaagataggaattaacttatctagggagataaaagacatacattggaaaataaacattgatgaaagaaattaaagaagacacaaataaattgaaagccatcttgtgtttatggattacaagaattaatattgtttgaatgttcatactacacaaaggaatctacagattcaatgaaattcttaccaaaatcccaatggcattttttacagatatggaaaaatcaattctaaatttatttggaatgacaaaagacctcaagcagtcaaaacaatcttgagaaagtagaagaaaactgaaggcaacacacttccaaatttcaaaatgtgttacaaaactatgataattaaaatagtattgtgctggcataaagacagacatacattcaagtggaatagaatagaaaaactaatgcatttttaaaaattaattgattatggacaatagtgccaagaatacacaatagagaaaatatagtctcctcaacaaatggttttggaataactggatatctacttgcaaagaatgaaattagacccttatcttactccatacacaaaatcaactcaaaatggactgaagacctaaagataagacctgaaactatagaactcctaaaagaaaagcataaggggccggtgcggtggctcacgcctgtaatcccagcgggaggctgaggcaggaggatcacaaggtgaggagatcgagaccatcctggctatcaaggtgaaaccccatctctaataaaaatacaaaaaaattagccggacgtggtggcaggcgcttgtagtcccagctactcagaaagctgaggcaggagaatggcgtgaaccggggaggtggagattgcagtgagccgagatcacgccactgcactccagcctgggcgacagagcaagactccgtctcaaaaaaaaaaaaaaaaaaaaaggaaaaagaaaaacaaggaaaaagctccgtgacattggttttggcaatgacttcttggctatgacaccaaaagcataggcaacgaaagcaaaaacaaacaatggaactacatcaagctaaaacatttctccatagcaaagaaaacaattagcagagtgaagaaacaacctatggaataggagaatttgcaagccatgcatatgaaaagtggtatatccaaaatatataagaaattcattcaacttcatagcaataaaacaaataacccaactgaaaaatgagggaaggacatgaatagatctctctccaaagaacatatacaaagaccaacaggtgtgtggaaaggtgctaatatcacaaattatcagtgaaatgcaaatccaaattgcgatgatatatcacctcacacctatcagaatgactattatcaagaaaaaaaacacaagacaataagggttgatgaagatgtggagaaattggaatctttttacactcttggtagaagtgtgaaacgttactatgaaaacagaacggagtttcctaaaagaatgtattagaattgaattaccatatgatccatcaatctcactgtagggattgtatatcccaaattgatatccagaagaattgtaattaggatatcaaagagatacttgtaccccgatgtttgttccatttacaatagccaagatgtggaaacaacctaaatgtccatcaaaggataaatggataaagaaatgtggtatatacacacaatggaatattattcaaccttacaaaaggaagaaatgctgcaatatgcaacaacgttgaagctaagtgaaataagtctgtcacaagaagatcaatactgcatgattccaattctataaggtatctaaaatagcaaaacatagaagcagagaatagaatagaatggtggttgccagggccaggggatagggacaaatgggaaactgctattcgatgggtattaagtttcagttatgcaaaatgactgagttcttcaaatctgctgtataacattgtgcctgtggtaacaatactgtgttctacacttaagattttgttgagagtaggtcttgttttaagtgttcccaagcataattttaaaagaaagaaagatggcatccatcaatctccaaagtctatccttccacttagtgatctaaaagaaagatggattgtattcgccacgattgaagcagaaaagtgtacaggaagattttagttagcctaactggatccttgtgcccaatctctaagcaatcattttttccatagagatacaatgttatatgggacaagcctaggcctcaacccaatcttgctgccaagaaaagtgaagcatgaaaactgacatttcatcaggtccacaagtgaaaactattggaaaggttcagataaagagggatgaagaatctatagcctccactatttatttatttattttttattcatttatttttttgagacagagtcttactctgtcgcccaggctggagtgcagtgacgcgacctcggctcactgcaagctccgcctcccaggttcacgccattctcctgcctcagcctcccgagtagctggggctacaggagcccgccgccacgcccggcttttttgtatttttagtacacacagggtttcaccgtgttagccaggatggtcttgatctcctgacctcgggatccgcccacctcagcctcccaaagtgctgagattacaggcgtgagccaccgcgcccggccgcctccactatttattagacttcagttggaattgccagaaataactaaataaatgccaatgtgtgcaaccaacaccattagaattagaaaaagaaaatgaaaaaattggattggatagagaaaattttcatttatttttacagtcagatgagtatgaagcactgaaaatccagaggcacaagtaagaagtaaaaagaaaattcaggagttcagaaaggtacaagaaggctgttcagtgttgcctatgttgaaatactgtctccaattttggcaacaagtaaaatgctgatggtttttatgaaatatctttattaattttgtagccataaacttcatcttttcataattaaatctagtattcccacccctgtggtcatacatctcctgggaaactagtatattcctcaacaaattccaatcctatattaagaaaagtaaaaagcaaagaaggaaaataaagatatgcatatgtaactatctcaaatttcatcttctggctgtcctctttcctaagcatcttctaaagtgttatggatttaatgtctctttttaagaggtctttaaaacagaatgaaactttaaagctcaattttgtgccttcttgaagcataaaaataataagcagttttgcaaaaacacagactatgctagtttttatttttctctaaagcatgtggtagaaagaaccaactttctttggaaataaatgttatattttgttccttcatttgtcagcatggtttagtgattgtttcgttcaggttgtatgggaaatctcaaggtgagttatctccaatcaaagaagttgaagtgacctaagcaagaaagcacattttgtgccttacagtatactcacttgtctctttagggaactaactactcatttccttgtgttctcaaaacgtggccatttaaagaaacttaattataataattttgtaaacatttccttcctcatgtactcattaacttagatggaattgaaactttttatagataccactatgactagagtcacacatattacacataagtaattacaaagttaaagttagaacaaaaataatatatttatgaccacttcatttgctggttaattagtggaatttggaatcaggtcaggctacagagcaatggtgtactagctaaattttttaaaaatagtgtttgaatttcttcagattctagaatttttttatttgttttaagagtgtttaatgtgcaggaactatctcatgtattccagtcactattgcttcaaagaaaaagaaaagtatctgcattgatggtcaaaaccaaaattttaaaaatagaagaaaaaatatataaaattgcttgagtgagggtacaatagaattaatagattaatgaatgaactaaaaactacattaatatattaatatgtaaaatgaatctatctgttagcccattgttaaaaaatgattttcttcctttcgattctcttcttccagattctttgtctttttctatggaccaattgtcatctttcctaacagaagactacgcatccctgtgatacctctcagatgacaacaaagttctgtaaggtttcttgtgtggaaatgacaggacacatcctcaaatcctgccagcatttgtttagtaagagtgctggatcatttgagggttacttttaaatttcctgagccaatggtcctcctaagccaactattcattctgtgtaatggctgatgaaattaacaagggacaaaccaaatcccaattgcctatagagcggtacatcaaagatatgcatatccaaaacatagataaaatcatatatactatcttgtagtgtggtttttgtctggagatgttttcattttttactctttctagaccaataagccacacagaatgatttacattagtgttgatgggccagatggttttgaacaacattgataccatttaataggcataagatatactttaggttttatttaatgtttatgtcatctttatgtaactatattagggtaaataaatgataaatgcttacaattttcaagtaaatagtaaaatagtcaatagttcttggatatgcaattgcagtattccacagtcaacagaatcagtattaaaaccagcttaacttctatgacaagcaaatataagtaccctagaaatatgttggctttcataatgaagctatattaatatacaacattgaatgtatattctacaaattgaaatttttaaagaaataagctggctgcatttatagatctcctaggagacttccactccatgtgaccttagagatcatcatttttatcattttacagtgtagcttaccatcacattttaaagcgcatttaccatcacatttaatttaataagaatagtgtctttaagttggatttaattatcccaatgtttcaagtgataaaattggggatctgaattttaaataatttgtttcaggacacaaagatacaaagtggcatgagccatgatttaaacacaagtgtgttgtaggagactgcatcgcacaaggcgctaaagtgacctgcataattttttttctttttttatatggagtctcgttctgtcacccaggctggcgtgcaatagttcaatctcggctcactgcaacctccgcctcccaggttcaagcggttctcctgcctaagcctccagagtagctgggattacaggcacgcacaaccatgcccgagtaatttttgtatttattttattttattttttttagtagagacgaggttttcccacgttggtcagataggtctcaaactcctgacttcaggtgatccgcctgcctcggcctcggaaagtgctgggattacgggggtgagccactgcgcccggcccctgcattaattttttaggcattcactccacaaagggctcactggcatttttcacaacactgatttgttttcttgcaaagatgtagacattcctttctgccacacatctatggtctacaataagaacccagtgtttctccagcatggatagagtgaggcttgtaatttcctctgtgaagcaacttagctgatgtggaggaatggttctcagcatacacttgattatttttcttcattttcaaagtcaagcatatcttttgcaaaatgctgcaggctttttgtttgtttgtttgttgtttgttttgctttttactcttgccacaacacaaatgttttactccttttctaacacaaattttcattacctacatccaatgtactgaaaggcttaaaaatgaaacactgtctaagcctttgagatataaaattgaattagatttacactacacaaagctgtctctctatagtccacataatctctcccatctcaaaaattacattgctaatatatatgaactgaaagagaagccaattcaggaaggagctgattcaagaagtgcaaagagataatcccattacaatgagttttcaactcaattaaataaggctcaagagactgggcaaattattggggctattcatatcatttcattagagcaaaatttcactgtaatgaaaagagaagttattagctagaccttgaaaaggcaattcaagattatttttctaatgtgatttgacttgtttataagtatttcttaaagctagttttatctgtcatagcttattataagaggtttcattattgtttttcaagaaatgccaaattgctaaatctcaatggggagcttcatgtgtatatgtctgaagagcaaagactacatgcatttttatttgtatgtatgttaataaacaccattttctgaaaaattacagttcaatagactattcataaaacatcaaaattttatctcagtgaataaaatactaagtattcaaattattatactttattccaaaatttcaactaacaaagattttctgtttattagcattcttactgatatgtatctattcgagatgaaatttgggaagagggagggagctggtcggaggtgataggatcatggggttggtttccccatgcttttcttgtgatagtgcgtgagttctcacaagagccgatggcttaaaagtgtgtcacttccaatctctctctctcttgtgcatgcatgcatgcacacgttctctcctgccaccttaggaagaaagttcttgctttcccttcaccttccaccatgattgtaagtttcctaaggcctcccaagccatggagaactgtgagtcaattaaacattgttcctttataaattatcccatcttagaagacaccctgtcatcccatgtgaatggaatttatgctcctccttctctgtaggctgggtctttgatttgtctggcttccttggatgcaaatccaggacagtctgccatcaaccctgacattgggatggactataaaacagtctctctccacaattaattccagtgttccaacatcacaaactggagaatgactatagtagcctgatatttttcctcctatgtgtattcattccctacaaatattgatatcttctaaataaaccgtaaaattctttatatatagcacatatatgacccttagaagtgtttattacaagaacttaggtggaagagtgtgtatcagtttgtgctagctgttcccacgtagcagctcttttgtaaggcacaaggtaagtagctagatttgtgtaacagaacagaacgcccagaaacagactcaagtccattccatgtttgaattacacataacatcaaaaaatattttaattaggaagaaagtgagagatgattcaacaaacagtggcagtacacttggttgactcttgtagacagaaaagcacagttcagagaaggttctggcgtcattctcagcacaatgtgagtcctagctttgtaacctagtaactcagtgacttttggaagatcattttaacttattctgtttcagttagcttgtctttaaaaggaaaataagcctaccagctgaagacattgggagagtttaacagtatcataaatacatactacttaggaaagcacttgaccatagtataaataaatgcctaataaatgttaaatctcataataattagaaatattaaatcatggtctgggcaccatggcttacgcctgtaatcctagcactttgggaggccgtagcaggcggatcacctgaggtgaggagttcaagaccagcctggccaacatggtgaaaccccatctccactaaaaaaatgcaaaaaaattagctgggcgtggtggcaggcacctgtaatctcagctacttgggaggctgaggcaggagaatcgcttgaactcgggaggcagaggttgcagtgagctgagatcgcgccattgcactccatcctgggccacaagagcaaaactctgtctcaaaaaaaaaggaaatattaaatcattaactcactagatgaattgcagttaaatgtaaatgtataaggcaataaaataaaataatgttttagcctagggtaaatatctttctaaatatggtatgaaaagctggaaactaggggaaaaaagggtaaaaagtaccttcttagtgttttttagattatttttgacaaaatacacataaaggtcttagtagattatgtgcagtggggtgtattcaataagtattagcttaaatataatttgtggaaactgggagggacaaataagggacattggagataataagacaaataaaaccaaattgaagtcttttacaacctattaaagatagtgtatcatatagggaacatatggggctctacaattgaagtaccaaataacaatatatgcactgtggtcccaaattgtaaatttctatatttgtatgtgaatgtgtctgtttgcatgtgggtgtgtgtatgcccacaaggagggacagatctaagaatatatttaaaatattgttaataattttctctagtagaattacggatatctttaacgacttctttatattttagagtttctctaattttctactgtggataaatattatttgcataacgagaaaagtaatcttaagctaaaatagcaaatgtctttcgaaaagcaatgagagaatataatccagttgaagaaaactgttaaggcatttattaaagttcagataaacttgtcacatggggaacaatgtctcagatgttatcctatttgcagcctaacaagacagcctgtcatattttcatagatcctggcagaaagatgtgaagtttctgggtcagtttgttacacacagctatagcaggattcagagtaacattttgcccttatttgctgagccccaattcccacagggcaacatgatgagggtcaagtgtttcctacttacagtgggatgaattacagaacactgatattaggaagtccatgatcttatatagatactgccttgcaaattggcccaacctcctctccagagagagacattacctttatgaacctggaatttaaatctgctccagggaggagaacatcctcacctttcaagactatttgcttttacaagcatcttgcaaagaaaatctagagaaaattggctgataatggctttgttcagaaaattagacttgcagaaatgtgagagatcacaagagaattgtctcccaacaaaaccatctcgctaatttgtaaagacatgcaaagtgagtctagttgaaggtgtaaatccaatatagcactttatatttagaaattgctattttggactgaagcctattcagtctttgatagcgtatatttttctggttagcttccttttagcctacttttccccataatttacctgttcatgagaaatactacaaatgtttgagttgatagtctggttttaatacatatctttattatgattcaacattttaaataaattctatgaagtttgttttgttgttgttatttgtttgtttttgtttgagacggagtcttgctgtgcctccaggctggagtgcagtggcatgatctcggctcactgcaacctctgcctcccaggttcaagcaattctcctgcagcagcctccagagtaactgagactacaggcacatgtcaccatgcccggctaatttttgtatttttagtagagaccgggtttcatgatgttggccagaacggtctcaatctcttgacctcatggtccacctgcctcggcctcccaaagtgctgggattacaggagtgagccactgcacctggtcttattttttatttatttatttatttatttatttatttatttttttgagacggaattgctcccttgcccaggctggagcgcgatggggcaatctcagctcactgaacctctgccttccgggttcaattaattctgtctctgcctcccaagtagctgggactacaggcgcctgccaccgtgcctggctaatttttttgtatttttagtagaggcagggtttcaccttgttggtcaggctggtcttgaactcctgacctcaggtgatccactggcctcggcctcccaaagtgctgagattacaggtgtgtgtcaccacgcccaacctgagggggttttttttttttttttttttttttttttttatgtaaaaggaaactatagcaaacgactatttctggaaatccatagaaacaaaaaagagttgctggccagatttactaaaggttctatatgtctttatcagctttctttattttactgctcactcttgtccacaggcattcataaagctttatctagacaaattcacaaagacagcaacaataatgatgctgccgtggaaaaggccaaaggtaaagaagaggtaagaaaagcaaagctttgatatattatgctaagtgtaaaagactggtttcattgttgttttgctcttcatttcaaaactgcacaccctacaataattttaggtgaaaaatcaatacggataaaaaacaaaactacttttttaaaacctttgtgcctgtaattttttattattctttcaaaaataaatatatgcttgacccctgcccactggaagtcacggaatttcaccttcattggtaatttgtagatacaagagttagctgactgcagagagcattttcaccctgatgtgacagggatttataaatgtattatgaaatatcagccacgggtgatattcactaaggaggaactatgagctattcactaaggaggaactataagctaatttttgtgaatacaaacaggttttcttatagtcaattggagagaaggaaaaaagtagtggcaatacttcaggaaaagaactgtgtataacttgagccagaagctgatttcagaggaagtgagtagcagagcacagcatgacactctgaaggcttaaatgcaaagcattcatctgagttcccggaagaccagaaagtcaaccttcttgacatcagcctatcctggaagcagagtgagcagaaaaaggcctagggttggtgtttatattaacaaagtgactccttctttctccaggaaccattagccatgctagcagatagttaaaggagtgggtttgggcaagattcttacttcccacaagcaactatgcatgatactagatttacttgtttcctgtaacttcaagttgagagtgtatataagggaggagcattagaatgtccagattgtatttttctgagatattatgaatatagctatgaaaaagtgtctcccaatcacctatttgtgtattaacaaagccatattttgaggcactaaaataataacaattatagagtcactaaaagaataattcaatcctcctgcctctctctttagtgacagattttctttcaatgtgtctctccttctcctatccctcagtctgcaatcaagcttccttcagaaaacattttaaagattcatttaatacgtcatgaaaaaaaatgagtgggtgttttcctgttcaagaaagactaaaatttctgcatttataaactttaagtgtcttaatagaaattatagaaacataagtaattatccaaacttcatttatacattgattttttaaagcagacatgaccttaagattctggcggaagtatggcaagattttatttatttattgacatatgcacttcaatgtccattttattccctctcttccctttggttctcttagatatttctgttcccagaattcaggtgcagcccctggtgactaactggtaaatcacttcaaacatggagcaaatgagggagaaacaccaaaatcaccgacctcctttcagaatttcttcttggctttttttttcttgagaccaagtcttgctcttgtcccccagactggagtgcaatggcgcgatcatggctcactgcaacctctgcctccagggttcgagcgattctcctgccttagcttcccatctcctcggctctttagcatgtgtaccttcacatctccccatcttatctcactactaggtttcctctttctagcctgtttgaacgtcttcatacctctacatcaacccaccactgtagaaattccaagtaggagtcatttttctctattgtttttgcattcatctcaacgaataggctatttctttctggcttaaatattctttaattcagcctcaaggttttgctaattatattcatctaatcgaataaatttattgaacaatagctgtgcatctttcattacaccagacattgcattcattcttcaaaattatacctctctctgcataccctcccctaaaaattatctctctcttgaaaactatatatccctggaaatagtgtgcatatatgtaacatatattttacatacataaaacatatgtcacatatatgtgcaaattcttgttcagaatttccagctctctattgcacatcttgcttatctcaaattcaatggctcaaaactaaacttatcattattctatcaacccaacttctccccatgaccccatgactttttatctctgtaatggtactgtcatcattccatagacaaggatttgaaattttaagtgtcttgaatttttctttctttatttccataggcagtcagttgctgattaatcacacacacacacacacacacacacacacacacacatctgcacacaggcatatacatgcacatgtgcatttcaaatattgtttaaatctgtcctcttctttccattctgtggtaaatatgttacaaaaatggtccaagttctttatccttccctgcatcatgtttttcttcttgtggttgtgaggtctctgactcaggttggtcatgggactcgctttgtccagtgagaagttagcagattgggacttaaatggtttttaaaaagtacttgtgattttccactttgctcttgtccttgtgccactggcatgagaagtgccaagtctagcctgggagaggatgtgaggtttgtgactccccatcaggttgccctagttattgcagtgaaggccatcccagagcagcatcagccaggtggtcacaagacatgtgagtggtcccagccaagatcaagggagctgaagagtcacctggctagtcagttgatgaaaataaacagttcgtatatcattttgtgatcatttgtaacaactaataatctatatactttcattctaccatgacttaatatagggctttactatattgacctaggctattacagcattcatatgcaaactaaccttttaccgaacattcttcctctaattcacctttcccaatactggtggttcatttttccttttagataataaataataagatattccttcttaaaatcctaaactaatactctcttgcctatcaagtcaatccaaattccctacccttggcattaaaggccttttgacactacctctcaatggatcattatttgtagcatttcttctatgcagaacacacttcctcctccaccaccatgtttacaaataacacccacccttcacggcagaattgaaatcccactttcttcttggttaaccagccaagagtgatttctttcttttctgatctaacttttttctttatacatgccttacagcattgaccacattctgatttataaaataattgacacggcacaagtcttatctcactttatatcctgatttatacttaagggcagagatctgagccatcctttactcttcctcagctactctttctgtatgttcctttctgtatcttgtcatgactactactgcaccccctccataacttcaagcttcccagtctccaagcactagctcctctctcctcccagatctcaacaattcctccatctcatcagaactttcaattctatactcctataccttttcaatgcccagtaccatctttttatgactcaatcaggatgacatgattcattatacactcttgcattttactctctgttcccttggacttctccctctcttttaatcaccagataaaactacagttcagagtaaataaaattatttgccttttctacactggcacttttgcagctgcatgtgactaaagaaaattatacaaccatgttgattaatctcactttaagtttataaccaaaaacttcaatctctcctttagtgctgcatgacaaaccattattttcctcttggccagtcatttaattttaagtaacaaaatcataacattctctctttttctaatcatcccaacattctttttctcttcctcatcatcaactattagccttgttttttatctactgggaaaacagaggcaatcataaatgaatttccaaatacttttgcttccatttcatcaatgtatttttatttgcaccatatattttgtcaatggattacattcctatctaaggaaacaccctttctatatctattctatggaaccccttctctcctactcaagtcaatcctgcaagtaatccttatattttctatatcattaatttttcccattctaccagattaatgctatctgcatataatgcttcaatattgcccatcttgaaaagaaatgattttactatgattttttcaagaggccttcttcagttctttgcttccctatacagataaactcctctgctctgcccctttttaaattctaatttctaccagcagtttttaaaaatctctctgcctttatctgaaaaaatgtgcataattgcagcatttagctctaagaagtgctgtgaggaataactgaattcattcaagaaaactattcacagtatggttggtaggtacatagatcaattaattagataatctataaatgacctttttaaaatataaaggcagataataatgttattattatatatataataatgttgttagataatgttattgttatctttacttctcttcttactgtctctggaatccactctcattgatacgaatttattgtgtggttgtaaaggaggcactgggtcaagatccagtcaaaaaatacagaaaccatgctggatgtttcaaaaagaagggatttaatacgggatatcagtaaaatagatgctggaaggctagaggcataagaggaaaaggtaaagtaactcagagatgagaaacttcagataatagctagcatctctgggtctaggagagcatagagaggaaatgctatttataggaactgcggccagggatagagctggtgcctaagaagttgaagagttggaagaggcacattgcccacaaacaaagaaagagggttagaactagagatgaagaacttatgggttgtcctcttattttggtttctaatctcccactagttccaccaatttagaaaaccccaaaaagagccaactatgaaagcatcctggaaattgtttgcacagccataattccagaattatttgccagggcacagaatggtatgtttggagctaaaagacatttggtaaatttctggcaaggaacatttttataattagtgactacactaagaaatataactttggcataatcctaaagaagttagcaataaaatatcaggaaaaaaattactcaggataacttcatggcaaaagatctgaaggtgcttcatttattttattcattcatccatttgtggaacaatgttacagtggaatattctgcttggaaaacaatgctatgtctggttgtatgagaatggaaataagtagtatcacaagcaccatagaaaaaaggagagaaaagatcttcagagatgatgaaagttgttttgttcacacattgtcaaaacaataattgtctcctaggtgaaagagaacatgtttccatttctaggtaattgtcaactttttctttctcaagctgtgtgttgtaactttataggtagaagtgtgtgtgtgtgtgtacgtgtgtgtatgtgcacgtgtgtgcatggcagggtggacggtttggagtcatacagtatagaggacaaaacttgaagccagacaactcgagtttaagtcccagatctggctcttttatctttggcacctaaagcaaataaattcacctttttgtgccttaaacctctcataagtaaaatgttagtacttaacgatgttgtattcaattagttgatgcatatgtaaagttatttagaactgtatctgccgccatgtagaattaacactatgtaaatgctacctgttatttgtcttgtgaattttgtcatagttttaatttttttctacaatttaatttttcctgtacatttttttcatgtttagttttccataagataacatgatatgtgaaattaccaaatattccattctatggcttaatatatttcatttattcatccattcactcattctaatctaagtttcccagcagcagcttagaatcactcaattgtaaataatcccatatgaagtggaaataaaagcacaatattcacaccagttcaaatacctgactgaatatgtccatcattctctctgaagactgcaccaaaagatgtactgtttctctccaacatcgtactcaaatccttaatcatgtaactaaaacctcttcctgagaatctatatattagaatgattgtaaaagtggcattatctctttctcactgagaatatgcttctcagaagaggaaaattggctccaaatagagcttatattttacttccctcttttataacccttagatgtttcaaggggactatgtaacagagtcagtcacttctctactaccaagactaatgattaaagtataaattgcatgaagttcacaagtcatcagagactattatatatgacagagattgatactatatctttcactggttggcctatagcacaggaataaaatgtacatatttcacagattgatactttagcaaaatcatagtaaaatggtttacattacttctaagacaattctaagaatatttgcatatactgtgtacctgtgtgtggaccgtatgtctatatattgcatatatgagcactacttaattttcttgctgtcagaaaaataaataaataaatttcccttatcagaacgtcccattcctcatcacctttccagtttgccttgtcctgtgcaattaactattgaatattgcatacaatgataaatgatttattcaaggcctgtctctccccaaatttaaatgcagcaatacccaatagtggtaaaataaatgccaagcctttttactgttaccaaaaagtttctggctatgtttgagttttatttcttctttttaaaaaattttattctaacaaaatgcataggattttaaatgttcagttcagtgtatttgacaattatatatgactatgacctgtgtaatgatcaaataaaagaagatttagcacatttctgtcaccacagaaagttcttttttgtctctttccagacaattttccctccaaaggcagccgctttctgacttctgtaaccgtctgtcagttcatccctttgattgcctggcatcatttgctccgtgtagtgtctgcaagattcctccattctgctgtgtatttcagtgatggattcccttattgctgggtagtgcttattatgtgggtttaccacaatgtgtttttctcttctcctgctgataggcatttggtttgtttccagatttagtctattacgttttagagttattgattatagattactgttccatagtgacatatgcatgtgtgcgttcatgtgtgcgtgtttatatgtgtgtatcaaacattgtaaactaattgtaaatgaccaattcatttccctcatgaggagaaattataaattttcatcttacctagttgaccatttgttttccatcataattacttctttttgtatcctgtctgaaaaatgatcttcctatcccccggtcacaggggaatagtttctatattttcttttacaaaacatggctctagaatttatgcttaaatctatgatgaagcttggaaaaaatttatttatagaattagctaggggtcgacaaaatattttaatatgaatatccacttaatttagtatcatttgtcttgacatctatgcaaatattttaataatatttacacaagctgacttttgaactctataccccttagttaaatagattagtttagaagataagtttatgtgtcttaaaagcacatcatgtcacattcatctttggacaatatttacttaatacttacttaaaggtatattgtataatatgatagttgttatggactgaattatgtgtcttcaaaattcacatgttgaatccctaactcaaagagcctcaggatgactgtatttgaaaataggacatttaaagaggtacttaagttaaatgagtctgttagggtgggcataatccttaatccaatctgactgttgtccttatatcaggagattaggatacacaaaaagagacacgagcaatatgcgtgtgctcaaaggggtgaccacgtgaagaggaagcaagaaagggccatggacaacccaaagaaagaggcctcagaggagtacagtcctgccaccttgatctcagacttccagcctccagaactatgagaaatacatttctgttgttaaagccatcctgcgtattctattttgttatggcatctctgttcccccacccccaaaattcctgtgttgaatccttaaccacccctgtgactagatttagagatagggtctttaaggcagtcattaaggttaaatgaggccataatggggcagacctaatccaatatgactgatgatactggtcacagagaaaggccctgtgaggacactctctgcaagccaaggagagagaactcaggagaaaccaaatttgctcaccccttgatcttggacttccaggcactagaatggtgagaaataaatttctgttgtttaagtgacccagtctgtgatattttgttatggcagtcctaggacagtaatgcagcagccctggcaaactaatacagagtgctagctagaagcaaatattctagatatagggaacatgcggcctgagaacagcttctgggaaaatctgatttcttagattcaggttctgatttcagtcttttttgatccccacaccatcgtctctaagactggctgggatgcctaaactgcttttctcattgtaaaaagcaatggtcactaacctgtcacattctacttctgcccacctatttctgtcctcctcttggcctctgtctcacccaaaacaaacaattaaacccagatactctgaaaatttgtctctagaagttcagttttcacgagaatattctccatcaaattcctgactattggttaacctacgccaaaaaaaaaaaaaaaaaattagaagaggtgagagaatctctattgatatttcctcccatttttgttctttatccatgaagaatgaaggaataaggagataacagaatttctgacaacttcagcctcttggttccacaaagaaaaataaaagtaactctttcctgcctcagccttcctggtgtgggagatgctaatgacagtgcggtggaaaaaacaagagcagcaaaagcaatgtcagtgtgaattctgttcttgtcaagtgaaataataataattaccattttcctgatcattataaatgtctagtgaaaaaaacaactagaataacccaagatttttcccctgatgggttcattatgctcagtggtttaatatatgtcatttttttaaaaagcctaaagttaaagatttaatttaaatcttaactagcaaataatatgtatagatataattgcatatgtatataatatatacataaatacatatgtataatataatatatacataaaacaccatatttggggaaaatagagtatgccaagatatcttaagacagtctgcatacaaaggtggtcttgaaaaactaattttgaatgcaaagaatataaacaaagagatataaatgtcaacttcgttaggtatcaatatttaaattaacagttattaaaaatgtagaagtactataaaattaagtttattacctaatttaatatttatcactaaatagttgttttacttgaggcaggtctgtactagtcagacttttagccatatcagcttatgaaaaacaattagtgcattttagtagcctccctttttttaatctgtctagtaagttttttaactataaatttctgtaccaaagaaatactacatagcagttatgttatattctgaaattatgattttgtttttcttcttttttttttttttttttttttttgagatggagtcttgcttcttcacccaggctggagtgcagtagcgtgatcttggctcaccacaacctccatctcctgggttcaagcaattctcctgcctcagcctccccagtagctgggattacaggcaccaccacctatgcctggctaatttttgaatttttagtagagatggggtttcaccatgttggccaggctggtcttgaactcctgacctcaagtgatccgcctgccttggcctcccaaagtgctcgattacaggcttgagccatcacgctcagcctatgattttgttttcaatgaaaattaaacacaccagtttactcaagataaaagttttcagtcatataacatttatgaaatgagcttgaattgtacatcctgtttaggtgagtccaaaacttttttgtttcgtgtactcgtgtcaattgggagggataaagaggtagcatatgctatgactttttggtctgttgtatgcatgtaatatttccatgattttccaagatttctatgtttattccttattttgccctggggtgtttttctgtagtaaatctctattttaaaatgtatttgaatgcaaaataaccttgagtccccaaaaggctgaaaaatttgcaagcaacatgtcacagaaagaagaaaaataagaatgaatacattaaacttcattacatttctattcttttctttttctttcaattttttttttcacctcagcagtgcagagaggtacatttcattttaagtataaactttatttctttgatgtcttagcccactcaggctgctataacaaaataccttagactgggtaatgtataaacagcaaatatttattgttcatagatctggaagctaggaagtccaagattgaggtaccagcagattaaatgtctgatgaggattcattcctcatagatgtcactttttatgtcttcacatgatagaagggtgaataagctccctcagacactaatcacctcccctaaggcctgcttcacaccaccacatgaggtattaggtttcaacatatgaatctggggacccccatggctgctctcaagggttggagttgagctcctgtggattttctaggctcaggatgcaagctgcccatggctctcccattttcaggtctggagggcagcagccccactcccatagctccattaggcggtaccccagtggggactccatgtgagtgttccaaccccacatttctccacagcactaccctagtggaggttctttgcaagggctctgcccctgtggcttggcacccaggccttctcatacatcctctgaaatctaggtggaagctgccaagcctcctttattcttgcattctgtgtgcctgaaggcttaacatcatgtggaagtcaccaaggtttatagcttgcaccctctggagccatggcctgagttgtactggaacccttcgggccatggctggagttaaagctaaagtagccaggatatgggaagcagtatcctgagggtgcatagagtagtgagccctgagcctggctctggaaatcattttttcctactgagcctctgggcttgtgataagagggacttactcaaagatccctgaaatgccttcaaggcctttttctcattgtcttgcatattagcacttggctctcagttagtcaggcaaatctctccagcaagtggttgctcctaagcccacttgtattcctctcctaaaaaaagctttttcttcctctgctacatagctaacctgcaaattttccaaacttttacactctgctttccttttaaatataaattccaacattaagtcattcctttgctcctgtatctgatcataggctgttagaatcagctagaccatgtcttgaatgttttgctgcttagaaagttcttccataaggtaccctgggtcatcacttttaagttctaccttccacaaagctgtaaggaatgaacactattaagctaagttcttagctagggagtaacaggggtgacctttactccagttctcaataagttcgttatttctgtctgagatctcatcagcctggccttcactgtccatatctctatcagcattttggtcccaactatttaaccagtctctaagaagttaaaaactttccctcatcttcctgtcttcttctgagccctccaagctcttccagcttctgcatattacacagttccaaagctgattccacattttcagatatctttttagcaacttggtgccaattttctatgttggtctgcaagtattgctctaaaggattacctgaggctggataatttattaaaaaaaaagtttattttggcttactattcttcaggctgtacaagaagcatagtgtaagcatctactcctagtgatgcctcaggaagcttacaatcatggcagaaggcaacagagagccagtgcattatatagtaagaggaagcaagggtgggaggaggtgccatggtcttttaaacaaccagatctcttgtgaactaagcaataacttgcttatgacttagcactaggggatgatgcaggggatgataagtcattcgtaaggtatctgcccccatgatcaaatacctcccaccagcctctacctccaacactgaaggtcacatttcagcatcatattttaaggaaacaaacatccaaactatatcaaataaccataatatttattatttgaaaaattcttatagataaatttgagtattcaaatctgattatgtaaataaattaaaggaaaaatacaattccagatggtgtttaaactcaaccttttgattaaaaaggaacaaaaagcaagtaccaattatttttgctacatctaagacaaaaagtcttcttaaacattaagaaatttttgtttaatcatttcttttaaaactggaagaggaagatgataatcatctattggctttaataaatgttttaagtgtgatgttttgcaagcttgtgatgacaggcagagtgaggtggtctaatttgaaggtgattacttccaactgactcagcttgaggtcttgtttatcttatcaacaaaagattttttctggttgtttgatttaacatctttataatgacaaatatctgatgcatagattggccacctacctatatacctattttatatgcatttgtttgctgaggtttaatatgcaagtattaggataaaataagaaaataaaaatatgtcaaagaaagtaaggaagatatatcaacttatgcctaattagttacattgattgatgattaaatttagttcttggcattctggcaagataacaaaggaaacatgatccattatctaattgtcatcatctgatgaaaagcagtctactaattcttcaagtaagataattttttttcctggtacaaagtcatctagccaatgtattaatataatggacaatgtattattaagtagaatgttggagtcatataatgatggtttatggacggaatatatcaacacaaaattgatgtcacatcaaagtgggtttgttgctaattacttgccattatgagataaaagtacaggcctttgatttaagaaaactcattttgcaaatggatatttaaataaaagtaaatacattcactgttagaaataaaactgaagatttaatgtattaagtgactgtcttcaagcagtcaatcaataatgtttatgatacctacactttcatgattttttttattttctgggacaatctgcaatttgtaatctgctcaacttttcatgatgatatgaaattcagtttaaattcatgaaaagcagtatggtgctggtacaaaagcagacacatataccaatggaacaggataaagtgccaagaaataaagccacacacctacaactacctgatgataaacaaagtcaccaataataagcaatggtgaaaggactccctaaatagggatgggataactggttagccatatgcagaagattggaactggaccctttcctttcaccatattacaaacattaactacagatgaattaaagacttaaatgggagatctaaaattacaaaaaccctagaagaaaagctatgaagtaccattctggacatcagccttggcaaagaatttatgactaatccccaaaagtaattgcaactaaaacaaaaattgacaagtgggacctaattaaactaaagagcttctgcacggtaaaataaactatcaacagagtaaacagccaacctacagcatggggaaaaaaatattcacaaactatgcatcagaaaaagttctaatatctagaatctataaggaacttaagtaattcaacaagcaaaagagcaaataaccccattaaaaatgggcaaaggacataaacagatatttctcaaaagaagacatacatgcagccaacaaatatatgaaaatatgctcatcctcactaataattagagaaaggcaattagagaaaggcaccacagtgtgatacaatctcacaccagtcagaatggctattattaaaaagacaaaaaacaacaaatgggttgtggagaaaaggaatcacttatatactgctggtgggagtgtaaatcagctcagccattgtgggaagaaatttggagatttcttaaagaactgaaaacagaactgccattcagcccagcaatctcaccactgggtatatacccaaaggaaattaaattgttctaccaaaaagacatgcagttctgtgttcactgcagcactattcacaatagcaaagacagagaatcaacctagaggcccatcaacatctgactggataaagaaaatgtggtccattaaatactacactaaaaaggaaggaaatcatgtcttttgcagcaatgtggatgcagctgaaagccattgtcctaagcaaactaacacaggaacagacaaccaaataccacatgttatcacctataagtagtaattaaacattgaatacacgtggacacaaagatgggcagtagacactggggactgcttgaagggggagactgggaggtggggatacattgaaaagctaccaacaattagctatggtcactacctgggtgaaggggtcattcatacaccaaacctcagcaacacatgatttactcatgtaacaagctttcacgtgtaacctctgaacctaaaatagaagttgaaagaaaaaaagtcattcatgaatgaatacctccatttaccagctactttgctagggtctgagaatttaagagtctgggcactattcatctttctcagttacagagctagcgttgggttgccctctgttctaagactcccactgcagtgaatctgttgcttccaaaaccaaagtttcagtactaaactcactgtggcagcaccctgagtggacattttaatgtgtcttttgttttgcaaaaatgtgtggacaccttctaagagacgatgctgcaatgtatgtgtctcagtccatccagaatgctttaacaaaataccataaacagggtggattacgaacaacagaaatttatttctcagttctggagacttggaaatccaagatcaaggtgccagcagattcagtgtctggtgaggttctgcttactgattgacagcaccttgacagcttgccctcatacagtgagaaagcgcaggggatctccctgaggtctttttataaggtcagtaatcccattcaagaaagctctgcttccatgacctaaacacctcccaaagatccttcctcctaatacccttaccttgaagttagaatttaaatgtgcacattttgtaaaggatataagtattcagtctgtagcagtatgtttccagttctattaattttatttacaagtaggaaatatactcatgaatatgccaattgacatttcaaatgtgccatttactacagacttcgcatagctctcctctttcctgaatgattaaatatatataaaatctatcagaatgaacattctaaactcaaagcacactttcataagtattttcctagtattcaggtgcacagccagatatatctgtcaattttctctctcaagaattacttggtctaaactggttgtctcagtgtatcagtatcagtcattcttaatcctccaaagataacattcagaggaatgaaataaaaacagagtctctaatccctctttcttttgtatcactctttatgcaagtaagaagatcagctttgatagtggattactggaggccacatgttctcattggaacatcacagattggatttagcacaaaaatacattttttctgatgtgtaaacaacaccagctgaatccatatttctcatgaatgtcctgccacacggctgtgtttttttctcatcatgcagccagttttattataactcccttttggcacagcttccaaagacttgcatctgtcacttgcagcagagcatcatgaaggttcaccactatcttggaccactggaatttagttgtattgttgcatttcctgacttagatgccgataaaatatctttaagtccctttaagctagttggctgcaacttacttagaggcactgctatcagctctctttttgagagcttactctgagccttaaattggcagcttgaacacatgagtttgttggaggtaatgactttgttctctggggttggattttgacagctttccaccattatagctgggtgtaaacaaaattgaatgggttaggattacccatttctcaaatttaaagtatttttggtgatccaaggaagagttgcctctcaaagattatctgactgaagtcaagaaaatttcacctagtattatcattttaatatgataatgtgaactcaaattcaaacttagcccgatgtttgctgtacaaggccatctaactggatggatatctttgagagagaggcttcccatcattcagttgaatttaattaaaagattaagtaaatatgcattatccttatccacctacttactcattaatacaaaaacatatgaagcatgtggatagacagtgagtcaatcatgagccctaaaagttgagggctcatgattgactcactttttgtctgtcttcggtcagaatggccttaaaattacaagcaactatggaggtttcagtgtttcatttcaaagccagacaccgtgctagttatctcatatgtgtttaaagagaaatcaaatgcactcactcttcttcagaatttcctccagcagcagaggagacatgactgtgaaaaataacagcaatgtaataatttctataatagaaatatgaaaaaaggccattagcatgcacaacaaggagtatttctgccttgacaggacatagaatattcttggggggatgatatgagctgagtcattcattcattcatttcaatttatgtattataaacgacatttttgtaccatgcatttctattttctctcatgtccttccttgaaggatgaggttcacttctctccccaagggaagtaagactatttcctgcagctctttgtataatagtccctttaatcccttatctgaccaaatgctttctccagctaagctgtgacgtccaaataattggtctaatatccaggaaaggagatgagtgcaggataagacatgtgttcctacagggggagacctctacactgtctttaaggaaggaagtatgtcagcttttaccagggaggagtgggcttcctctgcatgaacagatggtctaggggagtctgtgaatcaaggttgttctagcgtatcaacccagatgtcttcatcacatgactaagtttgcatttcttaatcaacgccttgacatcacataggataactgccttggtccatcatttagccttctttgaagctctggtgctttaatcattaagttcttggcttggtcctcagctttacttgctctctggctgtagttaggccttgctatgctatcaaggaagccctctggcttttaaacttaatttcaaattactgcctaatcactttggttatctttcttcaaagcatcgattgcacttaacaacaaccacttgctttctctatactttatgtcagttgttacctcagattactcatcatcatgataatctgtacttactattgcattcctttcaataatatactgaagcacttaacaacattgctatcttgtacaaggttcatttttgttcatctgacaaaagttatggaggcctaaatgtgagctagcaggtaattaagcttctgaattctatctcttctttctctgaccagtcggtgccaactattgcagactgggttccctgggaagcaaaatttgaaaagattactacacaagaattctaccacagaagtccttgaaaacttaaaaaagtaatgaaatgaggcaggattggacagaaggagaagctaaacagtgatgcagtccaaacaaaggccaaacctacaaggagctctgaagctgtgacgggccttcagcattgcctgcattgtaatgagagaactgggattttatattcctgcatctatcataattgaatgtaggttgtcacttgggtaaagcagctgtctccaacatggggcattttccagaaaagactgtcatctgagggcagtaagccagtgacattctgaaaagctgagagcctacatatttcagtcctaaaaaggagtctgtgtggcacatcacaaaatccactctggaaattcaggtgttactagcctgtagtgcttacagctactttcactaagacaaaataattgtatgccagaagctacggcagatggccatatgagcctcaggcagtggtccaggctccctgtggttttcaggacactcagaattacttgaatactctggataggggccacaggcattctacaaatgatggcaggtccaaaaagggctgagatcattacagagaattgctcagtatttagcagcaagggaaaccagcagtgcaatgacttttaacactaactatctagagttagtccaaattttacaggtcctccatgagaccaccttacttcagacaccagctgcatgctcaaggatctcagggacatcctcacttctaaccaactggctacacacttgagggttcctttcaggtttgagaattcacttgaatgactcacagaactcaggaaagtgctacatttatgattacagcttcattatagcagagacgatacaaaatcaaaaccagccagagaaaaaacacatggtgctaagtctggcagagtctcagaccctaagcttccagttgtcttctccttgtgaaatcagaaagtgtcaccctcatggcacattgaaatgtgatgatacacagagcattgacaaccacagaagctctccaagctagatggtgagagttttcattggggtttcaccatgtagtcagtcatgtagtcatgattggctgagtcattggccatgtcattgaacttgatctcctgtcccttgtcatctcctcagaagatctgcaagaagagagttaaaaactctttgtttcagagctctgtttgagagttaaaagctgtttgaaatactagctttggttctgggcactatacttaatttacacaaattgtttctgctctctgatttaaagactcaactatgtaaatacagcttctaagaaatttgaagcatcatagtgggagaataaagagagaagttaagaattttgtcaataggagtccattaatataataagcatttcgtaagtgctaactatataagtcactctgccacaaaccacagacattcccgaacatacatatgaaattaagctggttatggcctgctagagaaaagaatacgtgagcacagaaaaattatccatgaaatcctggatagaatgttgaagatggctacaaattggagaaaaggcagtatattagtccgttctcccactgctataaagaaatacctgagacaggatactctataaagaaaagtttaattgactcacagttttgcaggcttaaaggaagcatgatgtcggccatctgctgagcttctagggaggcctcaggaaatttacaatcatggtggaagacgaaggggaagcaggctcatcttacatgactggagcaggaggaacagagaagggggaggtggcgcacacttaaacaaccagatctcacaaaaattcactcaagtatcatcaagacaataccaaggaggatggtgctaagccattcattagaaactgcacctatgatccaatcacctcttacccagccccacgtccagcactggggattgcatttcagcatgagacgtgggtagggacacagatccaaatcatatcatgcagtgacctgtaaactatttcaagtcatgcagtgagcaagtagaaaaaaataaaagttaagaaaggtgtaaaatttgtcaactctagactcacgacaaagacacccccccaacacacacaataacctgctcacctggacaaagtgctcactcatcaggaagatagccaactcattgaggttgattttgagagcctggtcttgctgtgtctactaatcttcaacaaatatgttacaaactctgacattaactcccagtcatttttcttgccttgaaatatacacattaatctatttgagtccaggggacaaaatctataaattatctttttcccgccttttgatactaagagatggtgaatgtggagttttccatttctatagtaagcttaataaactcagctttgatacgtaaagatttctgagtaaattttacagaaagtcgggacatgagccagtttggaaagataaattatgtacgatttaaataaagaattctagaaaaatatatttgaggaactgggggagggaacaggttactgagacatgggacttcaaagatgtccctaagttcaaaagctgaacacaataatgttatctttcccttagagagatttatatacattccaaaaggtcagagtaaaaacatgcttcccaatgagcaaaatacctcaattatttttttctgaattactctcctacaatacaaattagtatgtataggataacatctgaatctcattgctttaccccagggttaaaaagttgaggcatcaggaaaccacaggtttgtttgctatgagtaaataataattttctctgtgttagaaacctcatgtgtgtgtgttcaagataataataataagtatggatattaaaaatctatcttactccctctttccatttcccaagtgtcttagtccattcaggctgctgtaacaaaataccataaactgggctacctagaaatgacagaaatttactactcacagtcctggagtctggaaagtccaagagcaaggtgaggactgatttggttcctggggagggctctcttcctggttcatagacggtctttttctctgtttatccgcacatgaggaaaaggttcaaggaagatttctgggatatccataaggacacttatttcattcatgggggctctactctcgtgacctaatcacctcccaaaggcctcacctctaaatactgtcacattgagaattaggtttcaacatgtgaacgtcagggaaataaataccccacttaccctagtattgttacacattgcatgcttatatcaaaatatctcatgtaacccataaatatatacacttactatgtacctgcaaaaattaaaaaattcagtctctagcactaagatttaaactttttagcagtttcttctcatcttgatttccatatttcaaatacaaattttgtagtatttatttcagtccaaatttacttcagaaaacagaagccagcctgtatcttttaatggttttgatacaagaaattgaaggcttacttgactattggaaagactgaggaggaaaaaaaatgtggaaaacaaccaaagaggattttagcttaaatatgtaaagtgggtcatatgtcctcagacaaagctactgtaaatctcaagactctatggatggttgctatccaagtacctcagttatcagcaccaatgatcatgactccaaaagctcacctggaggctttctgaactctcacagctgtcaagcatttgttctcaattgccacctgataaaggtctgtccttctgcttgacctttcaaatctcagacaagtaacattcattggaaccctaagaagaaggcgaatgtggaaaacatagttcccagcttctactttctagagaagaccttaaaggaggtgggttcgatgcctgccaagttgacaacagatgatccaacccactatgatttcctgatacatcaattttagatgtgatctattgcacggcatgttacgatatgttttaactcccttatacttcttcttgctctctcgctcatcctattataggtgttttgattaaatcaatattcaatgtttatagggctacaactgtaaatttatccactactgagaaaggtggcatatttatgattagccttccatttcataaacctttttttcccctggaattgataatggtggcattcttttttcatttgcttagttgtgctttttttttttaatatctgatactgactgactatccaaacttatacttagaggtgttaaacaactttcaataccatagtccctgtggtcagatggagcaaataatctatcagttctttttatctgcccctcccctccccaccccattatctttttcatgaaatttttcccagagctgtttttctcccatttgaaatagttgttctcttggcctactgcaaaaaggttgatctaggactgctccttcatgttttcctgtgctaaatctccttttttttttgagacggactctcaccctgttgcccagcctggagtgccatggtgtgatctcggctcagtgcaacttccgcctcccaggttcaagtaattctctgcctcagcctccccagtagctgggattacaggcacccaccaccacgcctggctaatttgtttgtatttttagtagacacagggtttcaccatcttggccaggctggtcttgaactcctgacctcgtgatccacccacctcggcctcccaaagtgctgggattacaggcgtgggccaacgctccaggccaaaacctatttttaagagtttctttctctatattggtttacttttacattttgatgaaacacaccctataatagctttttgagcaagagtgcagaggaggtttttttttttcatctttctgatgttttaaacttgtcttttctatcacacactatttaccttttgtccatctaacatgcagatacaattctagtagaattaagaatctttgtttcattcctcagtttatttttctgctgtccttttttagtttcaaagttatttttgttccttcattgttgttttgtatcatcttgtccttgttccatagatatatcttctcgttttaatattaattgtaggtgattgttagaaaaatattctactccataaattatcactgttttcttaactatcctttacccacttgttttttgatttctcttttttatcaaatatttcatcaaatatctggggaatgtggtccattcatgttcaagaatgaagtacccactacacaacagatcagaagccttatctgtgtgcatgagcagaaattgtcaattattaggcattgttggaagataatcttgcagcaagtaaagtttatttgtgggtcctcaaatttgaggatttcatgcattttctctgcaaccagatttacgtgggataacatactaattttctgtcttactatggagcaggcagaagaaaattgtatctagctgcatgtgttcgaagaacaagtagaaatgggagattgcgaattttatcattatgtaagcagattttcacttaattcacttattttcagcatctgtctcacctttgacttccatgatctcttatttttctcagttggagtccttactgctttgatttcctcagaagatagaattctggtcagagattggatgacagtgaggacagaaaagaagaggaagttgcctgtctgtgtgggatctagtagggctcaagggtctacttttccttacagagatttctgccatcctccaattttcagccccacaattcaccatccttcctatttcttccattgtacaattgcatcacatcctaagcctctgctttattatacaagacaagtaaatttctttctcctgtttcccttcgcatagtctcagatggttagcagttgcagcacccactctgctcacccagaagcagaggtcttagatttacattgtcattcaaactaacaaggcacagtaggcttcaaccaacaccaagtttatttagctttaagaaagaatagctgggtgcagtggctcacgcctgtaatgccagcactttgggaggccaaggcaggcggatcacaaggtcaggagatcgagaccatcctggctaacactgtgaaaactcgtctctactaaaaatacaaaaaaatagctgggcgtggtggcagacgcctgtagtcccagctactaggaaggccgaggcagcagaattccttgaaccgggaggcggagcttgcagtgagcggagattgcgccactttactgtagcctgggcgacagagtgagactctgtctaaaaaataaataaataaaaagaaagaataaaagagaggaattgtaacatcctcagcagcaccgtagccaaggtcctatgactcacaagcatgatcatgagaagtgaggctgactgtgtgccgaccacctcagctccaggaagccgtcagctctggggtctctacagcttctctgcattcctgcttatccagaatcttgtgcttttctcttgtgctgctgaaactcactatttgcaaagtatttatcaggtagatgttaccaagcagttagaggatacctagttaacaatctccacagctaggtacagaggcttgattcagtatattaaaacttcaggagtactctcatttttcttggagcttgtataacctttaacgtttcttcaatccgtgtcactaatttgggcatctactatgggctgaattgtgtaattaaggttaaacaaagtcataaggctgggggctttcaataggattggcagtcacataaggagagaacaaaagagattcccctccttttgtactctgaggacacaggaagaagagggccatctgcaagccaggaagagatacctcatcagaaaccaaccctgctggtccttgatcttggccttcaagctgccagaacagtgggaagatacatttctgttgttaagtctcccagactatgctattttgttattatagcctgagaagagtaatatagcatctaaacctcagacatcccgtaagccagacaaaaggactaaaccagctgttaatgataagcagagattactttccattcattatgccttaatttaggaaaagcgactgtaatattgtcccttagtattttctggaaagaacagacgcatctcattctcaggacgtggtgcaagggaaatttccgtttccttccactgagacatctttcaaaacattttttaaataaaaagtactaaaatacaatttaaagaaaagcctgaggactgacaatcattttctcttccatttgtgattcaaaggcttctgtttaatcaataattccctattcaaacactttacctggatagtttaatggctatctgaccacttgaaatgcaaattatacagtttttaatctttgaatgagattctgagggtcaaagagtagttcttactccaaagcataaaccattctgacagatttatactagagaggctatactaaataagaaaaatgtttaaataattcagataataatgcaaactgttaactcttagaaaattctaagccaagtgttttctaatgtgttagagttagctaagaaaacacacaagaaatccaagaaatctgctgagtagataattctattgtgccaacacttattagtttcatgcatctatttaagaagaccctgaagctttataaaagacatttcattttatatactgtaggtaactgccattatgcaaatattgttgccatttaactccatcatgcattttatctgataatcatgagttgtaataataagcagacaggtataattgagtttattatatggcctgttcagtttctttcctgtcgtaagaatacaagagtaaccaaaagtcatagtttgatgtttagtgtaactaaagagttttctttatatccttcatttttattcttattttaacatgtgaaaaacacttaagctacttttaggtgtctaatatttctgctgtcagaaggcatgacaaaatatttaatagcatagttaatgagaatttttcagccattctatcaagaagtagtttgctaatttaaaaaatctgaatgctaataagttggcttagctaaaaaaaaaaaaagtcaaaacaaggcagtaaaaaaatacaaaatattaaagctctttttgtaatgctacaaagaatacaaaaataaaatttgtgattttaccattgatagttttcatattaagactgaagctatgtaacatactaattttaagtgtactactaaatatttttctttctattctctatgcttacatgaaattttaaaaaatgaatattttagggatgtaaaataagaacagggagaaattgataccaagtacagagaaaaaaataacatttgtggaaaagctcttggtagcgatggtccaaatttaattttacatctattattttacttactgagacgaagactgtctagaatccaatcctaatattttctaagactagctattagccctgtgttgtgtacagttcgttcatcatcaatcaagtgaaaacagtaggagaagctgccccacagagttgcagtgaagatgggccaattataaatatgtaaggcagttagagcagcacatgcacactagtgagtatcacatcagcacttgatacttcttaatcttcttgaacttgtagtgaattacagaactcactacaagtgagttataaatataaaatagaagtgagtgggatgctgggactctaacacattgacatttaaataagatttgattcatgaatatagccagaaatatcttactaggaatatttgcttttctgaaagagaaattcaattttgacatatattttatcatgtatgaatatgtatatatttatataactatataattagatatgacacacatacacacttgtgtatctgaagtagagaaaggtctacaatcaactatgagaagtcagacgttccaatgaaacagaacaaacaaaaggtctatggataaaaagctattgaaaaacattagaatgaaaaatttgaataagtgtctaagtgaattccactagtcccatataaaatctacctttattctttgtgcagtcactgctgtgcctatatttcctaactaaaattaatgtcacctatagcatagcatccttttagtctcttctactattgaaagaggtactgcagattacaaattatcttgagctcaggtaaattagacagttcttgtgttttgaagcaacatcttgaaaaccactattaaattaaacagccaatgtctaagagaacaaatccttaagcatgagaaagattgggagcaataacttcaaatataaatctactatcacccgctgaagaggtatagtaaacaaagagcatctatatctgttcatcagttattgatgaccatttgatgccaattttatgagcaataaaccagatacatgggttcatatgattcttttattatacttatattacctcatatgtcaaagtccacaaaacataatttttttcacttttatggaagttatgatgaaaaatataatgatagattggaggcagatagattattattttgtaactgcttcttcatccttaaaatgtgttgttattcatatagtttgaggattgctttgggctttattttcttttgaatatttacatgactcttcttctacacaatattctcaaaagaatatatcgtatctgttttctttgtcaagaacagctgttacctcacccgctttatctgtaatgaatactttgaatattttagcccctatgtacacttcccttttctcacccttcttttatgtagacaactaggaatgaccatcatgagaaatagtattaggctaatgacaggttatatgaagggttatgactctgtataacaacttctctatagcatcagttttcatacttcttggacaattgttcattatctatttcatattttgagtggaactatgtgttaaacaaaatattttataccaaattcaaaacttaaaaagcacttaaattatattatttttcaaacaagcctagaaaacaaatgaaataataaagagggttccttctgtcacaccaactcaaagtaaaggagctaatgctggaggtaattaatattgttgatttatacttttatatctttgaatagcatatttttaaaaacatgatttagaataagttgcagctgaatctctgaaactttatttcttttgtaaagtgagaagtgttggtatgtacctcaaaggactagcaacatgggcactcgcttggagcttcttaaaaatgaagaatccttatgctttgtcccaaacctaataaatcagaatttgaagatggttcacatgcatgataaacttagaatatcactgaaatggatatctctagcattgtgtaattttatgatttttagaatccctagaatggggagagtgtagataaaagaatctacttccaaccttatgctatagaaaggtggaaaactacagtttggcaccaagtaaatataactgagttgtatctaaaaccttggatttaagtactttggttaaaatattgtttgaaactttacaatagcacccatattatttcaagggcaagagagacttttgtgggagggtttattgataaagaaaaattactgagagctttatttcactgtctttacggattcacaagttgtgaagcctagcaaagtcaatttggaaacttaaatttaacaaaacagttatcaatagcaattcattatcaatagcaattcattatcttcagaactgaagaattgtcacagagtggtatttctataaaccacttccactcatgagttaagttataagttttgaggactgtaacaggaggaaaagtttgtctatatgtagagagtggccacttaaaaagccaatttgacaaaatttgcatggcttcctgctgtaaccattaaaaactgtatcattcactctaaagtgatgtagggatattgtctagaaaaagctaataagcatcagaacaggatacctgaggctctatccagagtactattcttcatactgtgttagttgcctgttgccgtcataacaaattataacaagcttagtggcttaaaatgaaaaaactttattctattataatcaagaatcaaaaagaagggctagaaatcaaaagcacaataacagaatgatatggcttggctgtgtccccgtccatatttcatcttgaattgcagctcccatgatccccacacgtcatgagagggactaagtgggaggtaattcaataatgggggcaggttttccccatgctcttctcatcacagtgaataagtctcacgagatctaatggtttataaagggcagctcccctgcacaccttctcttgcctgccaccatgtaagacgtgcctttgctcctcctttgccttccaccatgattgtgaggcctccccagccatgtggaactgtgagtccattaaacctctttttctttataaattacccagtcttgggtatttcttcttagcagtatgaaaatggactaatacacagaagaataactttgaagagtatgtcggtaagctagatacagcagaagaaagaatcagtaattttgaggatatgtcaatagaaatttctcaaactgaaattggaaaagtatgaagaaaaccagaacatgacattccgccatgtggaatactatcaaaagttgtaccatatagataattagaacacaagaaagaaataaagataaaatggagaactatttgaaataacaatggcagaggtattttttttaactaatggcagacaccaaatcacatattcagaaagctcagagaacactaagcaaacaaataccaaaatatgtacatgcctagtaatgtattcaaactgcagaaaaccaaagacaaaagacaaagagaaaatcttgaatgaagccagtgatggagtagggtaggagaacttacctatggaagaaaataataataattacaataggcttctcattaaaaaaatcaaagaaacaaaaaaaaatctatgtaagcaaggagtagcagagtgaaatatttgaagcctggaatgctatatcaagtgaaattattcttcaagcatgaagaagaaatactttctcaaacaacaaaaagtgaaaaaaacatactaccaacatgtgtgctttatataatgtattaacagaagcttaataaaaaatgttatagaaacaaatatatagatcaaaaatttggatctacataaagaaaggggaaaagggtcataccaggaacaaatacagttgaaataaaatgctttatttctctgattctaaaatgacctaaaagataactgtttgttaaagtaacaattgtaaaaacacattggatgacatctgtgtaaattaaatgaataacaccagtgttacaggagatgtgagtaagaaattgaatatattctgtaataaggtacctgtagtaagcataaagaacagtaggtcatttgaaagttaacttagattagttgcaaatgtaaatccccagggagctcctgccccatcaactgagaaggggcagggctcccgcttgtctccagctcttgccatctccatggagtgtgcagccccaggtgcacctcctcacggcctgaggagggagttccaggtcctcgctgggcccctctctgcccactcctccatgcctgaccacactgctctcccttcagtgggagacttggccagccccattgtggtggcccctagggtggcaggctccagggggctcctagggttgggctccagagactgtctacctcctccccacatcctcctcacactgtcagcaggtgagagcagtgacatgaggccacatctagagcagcagaggctccaggcctgggaatgggtcctacctagttgtgcgagggtggggcagcagagtcggctgcctcaggaacacagggcacaggggacgctgggcaaaggggtcccaccactgccactgttgctcttgcagccacttccactgccactgctcatgtcccaccctcttccctccctcttcccccggctcctgctccagctcgcacaatggcagtggctgcttggaagcctgctactttcatcaattgtatctattaaagaaatcaatattcaatacaattcaaaagaagaaaatgccagacacagagtattttattgatgaattccaccaaacatttaaagaataaaaatactaatattacacaaccttttccagaaactacaaacagagggaatactttctgacacattctgtacgacacactaacaggctggaaactccatgtgataatatgatatagagatatatatatatatatcattttacagatatatgtctctataatgcaccatgatggtgaaagatgttaatagcagaggaaactgagtgtgagtgtttcgaaactctctacatcaccatctcatttttttctataaatctaaatattctaaaaataaaatcaattgaagttaattcaatttgatactagtacctcttagccccctaataaggcattttttgatatacaatttgtcagcctgccgtatatactgagatagattgacaaaaatatccttgtcattaacaaagccattgtggatgaaattatgtgaaagattaaatatagtgccatagtggtttttaaaagattatatataaactatcaataaaagggccttgacaataaattggtaaaattttaccagaaaactttgacactttatggacttaaaaatgtattctaaattggtaaataaatgcgaatgaagggtggggttcttccaggtatggcagggtagcttgcatccaatgaaccatcaaatgaactaatgtacagtgtcccaaagcaaccagaaattagaaaggaattgaaccctgaaagaatggaacagtactagtaaaatttatctttatacatatttttgtctgaggcctttacccaaaatgtatggagtagaacaaatagaattaaagcagaaaactgcagtattatttttctgaagaatctgtaggcagaatttaaggcttttaattttctgaaaatgcttggctaatccctgaactatacatgcctaagggcataccaaacagatgaattgcaccatctggaagaatagaagaaataaaggaaattttagttcctgctcacctgagagaaagtatgtttcataagatgaatccagctaagttaactgcctgcatcaacaacaactacaaactctttagctctttcttgaaacaaagcagaattcaaaatttctacaacatatcatctcagtgtttagcataaaataaaaattattacacatatgaaaaacaaggaaatgtgacctatagttcagaaaaaagtagttaatagaaacctattttgatatgacctagaattataattagtatagagatattataaatttaagttccaggacttaggagaaaactgctaataatgaatgaggatgtgagaaatctcagcagaattaaataaaaatactagaactacaaggtaaaatatctaaaataaaaaatttactgcattgtcttagcagcaaattagagatgacagaataattgttttgttatatcagttacagatacatagaaattatctggccttaagaacagaaagaaaatgatttttaaaatccgaacttaaggacttacaaacaatatctcatggcctgatatatatgtaactgaagtttcagagggaaggctacagagaataaagcagcaaaactatttgaaaaaataatggccaaatattttccaaatgtggtgaattaagaaaattaataaatccccaagtgtgataaaaataaaaacagcatacatgagcacacacattgtcactttatatttatatcactttatatttatatcaaaactctaaaaataagggaaaatgtttaaagcatcctgagaaaaatgaatgaatgatacattttagaaaacaacaagatgaataactatgacttcttatccgaaacaatggagtcaagaggacaatggattgagatctttacagttctgaagcaaaattgacaagttttaattctgtacccagaaaattaaatttcaaatatttaagcaaaattactatatttacagataagcaaaagcagagaatctgctgctggtggacttgcactataataaagacaattcttcaagctgaaggataatagcaccagatggaagcttataaatgccagaacaaatgaagatcattggaaacagtaaatatacttttaatttttgtctgatttacattaaaaaacacatctgtctaaaacgacaaacatgttgttattttctatgtttaataatgtaagtagatgtattatgtatgataaatatagcatagaagatgaattaaatgtaagcataatactatattatgtaaggtttcataatattaattcttagtaaactgtgataaattaaaagcacatattttaattcctagagtgaccacaaaaaataatggaatgagatatagtattgacatggtttggctgtgtccccacccaaatcttatcttgaattgtaactcccacaattcccacgtgtagtgggagggaaccaatgggaggtaattgaatcatgggggcaggtctttcctgtgctgtttttgtgatagtgaataagcgtcacaagatctgatggttttataaaggggagtttccctgcacaagttgtctgcagccatgtgagatgtacctttcaccttctgccatgattgtgaggcctctccagctacgtggaactgtgaatccattaaacctctttgttttgtaaattgcccagtcacaggtatgtttttatcagcagcatgaaaacagactaatacaagcatattgagacagagccaggatctaaataaaatttggtttaaaaataaatcaacagaagtatctgaaacctaataaacattattttaaaattctataccctagcacttattagttacacctttttttcaaatagcttaccctttttgaggagtagttttatcaagtataaaaataatcttgaagttgttgtttaaaggattataagacaacattagaaagtaccaaatataatctctgtggttcaataaatagacagtagttatctctaattttcttctttatcctaaaataactaggaggttacttcaatacaatagcagcaaaaaatatttttaacagcatccgaatatattagaaaaataatagcagtaatgaaagaattatatgggattatgcataggttaatgattgacacatcaaaagaaagcacatataagattttgtgaacatgtaatttaagtatgctgaaaacaatagaaagctaatcaaagagatgagagagagctttagcataaatatcatgtagaaagggaataatgaaagaaagacaagagcagtatggagatgcaacagctgttaatagcacagaaaataggaaacaacatcattatctccaggtgcaagtaggaaaatgcaaaatcctttcaccttcagtccttataacaaaatgactgactatgaagaatcagtcataaacttgaaattctagcctcattgcccagttaattgctttattaaatattaaattctaccttgtgggaacaaaagtgaattgcatggataaacaaaagtaaagctggctatcttttaaatgtagaaattacaatttttgtttcctctacaaattcatgactaaaattatgagataaagaacgatccctcagcttctaacccctaagaaatatcctggactttgaaaaagctgtaatatgtgtgaccaacttatatagtcacttgaattttgataactagatcctttgatattagatcctcttatcctcttatgatttttttttttttttttttgatggagtctcgctctgttccccaggctggagtgcagtggcacgatctcagctcactgcaagctccacctcctgggttcatgccattctcccaccttagcctcccaagtagctgggactacaggtgcccaccaccatgcccagctaattttttttttttttttgcatttttagtagagacggggtttcactgtgttagccaggatggtctcgatctcctgacctcgtgatccgcccgcctcggcctcccaaagtgctgggattatacgcatgagccactgcgcccggcccctcttatgatttttataatacacagtcatatatccgttttagaatgtggtaaaacccaaaacactgtgaaaaaatgttgcttttaatgtatcagaaaatgttctagttgtgatattttatcattactattataatttgtaatcggattcaataattcagaaacagatgatagcagggtgttctagtcagtaaatcaactttgtttctttaggcgcatgacatatcctttgagtgtctattgaggatgctcagaaattaaaataaaaatcctactgaatccaatttctgagaatcacaaaagcatatgatacagaatttgctgacttgggaaagttatcttccttgtggcactctcagaaaggctgtgctttctctaccaattcaagggattttctaagagataaagcacaattcttaacaggaataagaacggaaaaaagtatgacagacagaagaaagagaaaggacaatgcatgtacaagaaaagaaggaagaaagggagggagggaggaagagaaaaagggagagagggtgagatgggggcagggagggaaaataaaagaagggtagaagagagtccgactcaattttttaataattgcctgctctttctcttctgagcaaattgataagaaagcctgggtgccccttccttggttccagcaaggggttcaaactgtgcatgcccttgcccacatcagggaacactcaactctgccccacacttacccaccatataaaaaccccaagccaacctgctttaactgcattcttaagctattttcagaccagcttgagaagtgcacctgtgctagccacataactcttcattatctgagtaataaatcttttcataccctctcggtgtgtgtgatttcatcagctttgacatcagaaccaaattttaggtgggaatccatctaatatctgtagggtgactacaacagaaaggacttaaagaagatgaatgaaaataaggaaaaaagaaataagagagagaaggaagtcaaaagctactgctttttaaatgaacttcttcctctcaacaacaaaagcatggttccaaccacattccttccccaaatctgagaactgttctcagttctgcccataagaactattggagaaacattaatagcaatatggaaatagatatctaagtgataacattatgggatccatctgagttagagaaaccaagccaagccaaaaggtagagaaatcttccctgtaatttgttgccaagtgtttaagttttggtggcctaaagaaaactcaatctgtgttcctataaataagtatcacaaatgttagaataaattagttgagtttactataaccacttcaaaatagtagcagctcacttatccatcaaatatttttttcttttgtttttttgagatggagtcttgctctgttgcccaggctggagtgcagtggcacgatctcagctcactgcaatctctgccgcctgggttcaagtgattctcctgcctcaacctcctgagtagctgggattacaggcccgcaccaccaccccaggctaatttttgtatttttagtagagatgggttttcaccatgttggccaggctggtctcaaactcctgacctcaggtgatctacccaccttggcctcccaaagtgctggaattacagctgtgagccaccacacccagccccataaaatgttttgagttattttcaggtaagctttttcataacaaattcttcatttaattatcccataagtttgttggatgtatctaacattacagatatttgggttacacaggattgatacctaaatgaggatatgcaaagttgcttgtaatagtacctaagttttgcctttgcaaacaaaaaaataaatctatctcaacaatatctaacagtgctttgcaactttggtattaaatatactgattgagatggccactcatttttctctgtaatccgagttctgtttgtcaagtttgatcactggaagcccactttggcaaccccacaagttattgaaacaagccccttattaaattttatttttattttattgcacttttagctttcactgtagttcataagaaacagttataagaaaaaggatggctcttcaaatcagctgttatgaataactttacatacctgtttttttttctcacttccaacttagaaggaaatgcctcatatattcatttacatttcactcattaaatgaatactaattgagcatctactatgtacctagcagcgtgagaggtgctagagataaaaaatgaactataaagtagaatcagtttttatctcctttgagcttacattctggtagggtaagaaatattacaaagtaaatgcatttttacaaactatacaagtgctattaaagaaatgtgagaaagaatatataacaaagacacatgactgactgagctgagctctaaaggttgtgtgggtattattagaaaaatattatttcaagtccaggggagggtcaggctctatgttaggagggaaataagttcactgggggaactgaaagggctttgtgaaagagtaagaattctacacatcatcataatttcttgtgtgtgtgtgaaggtatgtatatgtgtctacaagtctccaaggaagttcatatttaaatttaatactaggtaatgataattatgggatattacattttccgcatatttactattcctttcatccttgtaaatttttggtctaaaattctctatatgagttgttgggttttataacgtcatttttattcccctttggagctgatagaggagggagagaagacagatgtgaaagaaagggaaaggaagaaataaaagaaaaatgataaacctaacatcattctaactgaaaggaggaacagaaaggtagttataaatgatcccagcacatggttaatatatatcccatagctaaatttgtcttctgtctcttacactgtaagataaaatataactaattatattgaaccatattttttagataaaataaacaaactttctgggctgaatgttttagtaaaaacccttagattccgctaatatgctaaatttcaggatagaaatacaatgtatcattgactcaaagctgtaaaaggtgcctaaaaggaccaaagttagatccccagatttcttccaagggaaaagatcaaaaacacttagaaacttaaaatttcttataattagatagccttcagtttgactggcagtttaacagtataaataaaaggcgagctttaatttatagcctcaatatgacatactggaaaattaaatcatttccatatttgcataataaaatttattatctgtaattaactaacctttagaaaatttatttttaatttcctcctgtcaacatatctgaaaaatgccaagttaacaagctttagcgtataagcaactacattaatgtagaagttatagcaagcattagatagacgaagcagtcatgtcctaagttaactaaagagttgtcattgtatcacattgttcacttgaaaacacatggaaaaatattttatatcaatgctaaatgacaataaaatcataagacattttgtatacactaatcagctaaagtaatctaatcagcactgtttacttgaaattcctttatattttataacagtatatttcattccacagaaaaatctaaaaatgaaaattcagttgcttttattctagttgttctaactcaactgtaatgtgtttatattttgtcattgaactttggaagcaagagttttacagtgatgtttttaaaatcttcaacaattaatagagagtaatttattgtctcactccatgcttgatgtaagcagtgttaagggagaattaaaatatacgttattctaccatagaatttggttctcaggtcctcatgtaataaatatgttttttatgtgtttacatttataagtatttatataccacatataaatgtatacatatatacaccatttttcagattgtatgactatagaagcttaaaggttttttttttttacaattataaaaaatatggatgtgaggccaatctggctgggacatctgccaccccatggatctccagggttgattcggctgatctggctggctaggctggtgtccccttcctccctcaccactccttgtgtgtctgtcccgaagctgtgcactctaatgaagaggacgaccatcccagacagaggaggaccagtctttgttctagggtacgtgagtagctgcactcccctgctagaacctccaaacaagctctcaattataaacaaatagcaccaaaacatttagcaacagtctttttgcttatttctaggatttatcaagctctgattaatgctctatctagtcattacaattcatagaaagaaaagcagtggtagcaggtggcattgtgaatttaagttagccccaatgtggagaaggacagcaggggctcttctatatcggcttcctgaaagcatgacaccagcaatattgtatgttttctaaactagtcagttcattagcgttccaccaaaaatttttattccacttcactgtcttaaaaataccagtttgttcactcatcagacttctttaccttgacataagaaatctagggtattgatagtgaaagatgtaaagtgaaacaaataaaagaaaccttttaagccagttctagaagaaagagccatcttatcatacgtccttatttatgtacataaatgcacacatatacagacccaggaaggaaatattcaaactaactccacatcttgctcttgtcaacaaaattaaatatatgaattactttaaattacatcaggtagaaacttgatattacttttttaaaagccagacctttgctagattagaatttagcttttttatgtcatgcttcagaaaaaaagagaccacaagtctttaaaaaatataatttagtatcttctcatcctttttttcttatcacaagaattgacggctgggcacagtggctcaagcctgtaattccagcactttgggaggccaaggcgggtggatcacaacgtcaagagatggataccatcctggccaaaatggtgaaaccctgtctctactaaaaatacaaaaattagtcgggcatgatggcgtgcacctgtagtcccagctattcgagaggctgaggcaggagaattgcttgaacccgggaggcagaggttgcagtgagctgagatcatgccactgcacttcagcctggtgacagagcgagaccatctcaaaaataaaaaataaaaaaaaaaaagaattgaccacaccacctatctagatgcctgagtagaaaacttgagattcatccatcaccattcacagccatgttcttcagatttttacctcccaaatttgtctcaaattctcccagttggcccaagttatcacccgtgcccaggctactagattattgcaatacaatgtatagctctaaagtggaaacttaattcatcaagagttaagttctttcttatttttctagaaatatattttaaatctcatttttattgactgttaaaaatcttagagatttatcaactttatcattaaaaaacttatcaacttcaccattaaaaatcttatagattataaatgagtgagagaaataattaaattgcatgtcatttacatcagaagataatctaacagattattattgaaatatacagaagtagactcttctcaagccaacattattggccactgtctcataaaatatagattgtagatggcaaaaaggaataattttttttttttgagaaggagtcttgctctgttgcccaggctggagtgcagtggcacaatctcagctcactgcaacctccacctcctgggttcaagtgattctccctcctcagcctcctgggtagctggggctacaggcatgtgccaccacactcggctaattttttgtatttttttagtagaggtggggtttcaccgtgttagccaggatggtctcgatctcctgatctcgtgatccgcccacctcagcctcccaaaggaagaattctttatattatataattttcactctctcattagagtgatcactatatcaacttttatttgtacaagtttgaagcaaaagctgtaggaaaatgatacaaattaataaactacactttctaatatgaataaacaacatttatctctgctttttctacagatttctttttcctaatgacttgctcatttgccaaactggcactaatgcaagaactctgtgattaactgatgttattgaagactgctttagactgactgactgtcagcatgcctccaaaattcatatgttgaaagctaatccccaataagatggtatttggaggtggggcctttggaagatgattaggtcatggggataaaagggactagtagcttctaaaagaggctccaaagagttgccttgctctttcctccatgtaaggacacagtgagaagacaattgtctatgaagcaagcagtgggccctcacagacaccaaacctgctgatatcttgatttatgacctccataactgtaaaaaataaatgtttactgttcaagccacccaatctgtggtattttgttggatcagcacaaattgactaagacaaaggcctaaaaatcacagatagaaaaatgtatcactaaatatcataattccttaattcccagctatatctatcagagagttccatactcagcctctcttccatcaggcacccactccccatcacatatggctgtaagtaaccagctcttccccaatctcttatcttctccaggaccagagactcctctgtgtcttggtaagagcaaagtaaaattggacatttcttcatgttgaacagtcttcatccaaggatgactcatttactcttattatgcagagtgatttaccattccattacctagaccatactattttctttgaaacacagcccaaatgttttaccatcagaaaataaaagggtctattaaagtgcctttccacataaaataactgcaatctttcaaccactttctttgaatttggaaacaactgtagctatgtttaaatagggtgcttttgttttttcccaactttcccattaataatttttgaaggctctggtatttatttttgtttatcttcattatagagtttctgcaaagcaatatggaaaggaaatgaaataagcagttggacagtggaaaaattaatagcatacatgttttaattttacacctaaatccttgagaattatctaaaaatacataggaagctaagaagtttaacccagcaaaaatcaaggtttagatatttatgaagaaaactgtaaaactgagtagatatatataaaggaaaactaaataagcagacatacaggtcatgttcttggattaaacaataaaaataaagttatttccaagctaatgagtagtctgaatgtaaagtaaatcaaaatttgactttatagaatttcttcctgcttttcttccctccctccttccttctctccctcctttgttccttccttccttccctccttcctcccttccttccctctttcctgtctcctttatttattacataaaataaatatttcatgtagaaaactatgtgtcacttactgtagtagatgccaagaatactagaggcaaatatagatatatatttgcactcactaaaaatgacctggtaacaaatacagacaattaaatagaaattagggtaaattcaaatatacatatatacacatacatagacacacacacacacacatatatacacacacacatacaaacagctatgtgtgtatatgtatagttagatatatatttattctttgtcttcaaataacagtaaaaaaaacaaaaaagtttacttcaatacatggagcaataaactgttttgctgaatagacaacatatttttcgatgcaaattctacccaaatttatttataggtttagcattccactagaaatttccaatcaaacttccactagaaattttctttaaacttgaaaacataattttaaaaatcaatttagaagaggaaacaggcaaatacagacaagacatggttacaaatgaaagtggtgaggaatcattggcactatcttatgtcaaagtctattcttatggtgctaatgttctttttgtcccctttgatgaggtaacctggggaaaagcgcataacccagtttgtgaagagttagagaaagtgttctagaagggatatctaagcagaaatgggaggaatgtgtaaaacatcaaccaagagaaaattcccgtagtgaattctagacacaggagctgaaatgggtaaaagccaggagacagtgtggcacacaggaggaaaggaaagtcattcaggatagatgaaacatacagtgtggaaatattgagaggcatgctggcaccacatctgaagagctctcaagctacatactgaatgcaatgcactgagtctttagtctctccaaaattgttaactcccagttaacaattgaaatgttgacccccagtgtggtggtgttcggaggtggggttttgaagagataatcagacatgatggtagagccctcatgaatggggtgagtgcctatgtaagaagaggccagagagctctcttgttctctttttatcaagtgaagaaacaacaagaagtcaacagcctgcaacccagaagagagccctcatcatacactgaatctgccagtgccttgctcttgtacttctcagccttccaaactgtgagaaataaacatctgctatttataaatgaaggtctgctatggtactttgttaaaacatccctaactatgactgagtaaaatacactgcactttatctcaaggaagagagaatcattgaatgctctgaagttgaggtagcatcagattatatctatgttttgaaaaactctaacttttaattttttcttaaggaaagaaacttgaatatgttgaaccactagtggaaggaagacaatagatcaggaaaagctgatgacatcaaataattgatgaaatgagatccatgggggtggaacagagtgtctggagggtttaagtttagaagaagagctagtatacctacaatattcttaatacacttgaataaaatgtcagtatctctttgatatctgattaagcaagtttttaccaaaaaaattgtcatattaaagccataatttttgcaatagttgaggctcatttatatcctgcttaataagaattcatcatatgtaaatcagcacatatataatacttaatttacttggttgtttagtgaaatacccacataacatttggaactttaaagatgtaatagaaagtatagtcacattcatggatagaatcacatttttctattgtctactttggtgaaaaatcaataactttcaatacaagtaagatgccatattggattattttatattcttaaataggacaaacatctaatatcaaattttatattactattaataatgaatttatttttaaatgatgtgggaataaacattttatatcaaatttatattatgtacaatagttcatcagaagcacagatatgtctttctcattattgactatgtattttcaaagtaacctgaaagtaatctgtgtgttatttgaaatagtgtattgtctatggcgtactaccctgaatatgtccaatcttgtctgaaattgggaaatgcagcctgtgtacaaaagtccgttgggtcatgaatagcccagcaacttccattcatcaagttgctattttgcgggcattgtcacagtgactcgagaaattatctagggaattatgctttatggtatacttgaaatgtggcaaacatcctcaaaagaccaggagtttgtattaattcattgcctgcatatattacacagaaaacacaggacatttgcagaataacttgcttcttgctatctggctttatctatttggttttattccactctctgttatccaaggtggccagtaatctggagccaagcattacctagattcaagatcccagaccacttcacccaaccaatttctaccagaactactttccaattatctcacatctagtaagccattttctatcctttgaaatgagggaaactttgaccctaaagagacccttaactacatacaatacagatttgaccttccatgcaggacagggctgtgttccccttctctccatcttctctacctccagctcctgtctcactgtctcatttacctctccactctatgccctagtgactttcctctacccttaggactccaatggttttctctgggctctttacaaccttgtgcctatctgccttttcacttacctcagtccattgtacagtatctgcttagatgtttgtttcacatgctacactgtgaattctaaacatcagagactgttttgttgttgttgttgttgttttttatttctaagactttgtggtgttttcagcatatagtagaggcttagttaaatgctaaagaaatccatgaattagctctatcatttcactttgtggcactttcgatgatacaaaataaattatattaaggtcacttaacaatttcttttctcaaggaaaagtcaatgaagttactgtaaccactcaatgcgttcagtttacccacatcctagacagagtcaatttatcaagactggagaattgcaatagagaaagagtaattcatgcagaaccagctgtgctagagaccagagctttattattactcaaatcagtctgctggagcattcagggatcagagtttttaaggctagtttagtgggtgggaagccagtgagtcagcagtgctaattggttgagtcagagatgaagacataggaagtctaagctgtcatcttgtgctgagtcagttcctgggtagggggtcacaagatcagataagcgagttgatccatctgggcgatgccaggttatccatcaagtgcagggtcttgaaaatatctcaagcactgatcttaagttttacaatagtgatgtcatcctctggagcaatttggggagggtcagactcttgtcgcctccggctgcgtgactcctaaaccataatttctaatccaaattctaacaaattttggctaatttattagtcctgcaaaggcaatctagtccccagacaagaagggggattgttttgggaaaggactgttagcatccttgtttcaaactataaactataaactaagttactccaaaagttagtttggcctatgctaaggaatgaacaaggccagcttgaaagtgaaaagcaagatggagttggttagatcagatctctttaattgtctcaggtataattttgcaatggcagttttattactagacaaactaatttataattttttattgatcaggggtatgagggtttttttcccccacttcaagcaaatatttgctgctctatctttccaataccaattgactaatttctaacatcaactgggtgcccgataattccatttaattccggcactaattacccagagttaacatcagatcctatgtgttaaggactcagttccacaagactgcccctgacttcagaggccaaccgtaaatggggtgcataggctacccatatttttgccttccaactacaaattccagagttcacaggattcctgacccaagtttggtaattttctggaataacgcacagaactcacaaagacattttacacactattacggttttattatagataaaactcagattttcagtgtgtaataaaagtggccattttatcaaaaataagaaatattgtcactattttaacatgagccctaatgaagtgtataataaattcacttatagttgtatttaaaatacacgtgttagtataagaattaataaatgactgaatgaatgaattatttaatcatgatcttcagaaggtcttacggtgcagttttatttttctgtgaaaatctaacccagagacaaataattgtatttcctatatggggaaaaagtaatgagctgctggtcaggggagacactttggcaatgatgatggaacattacagatcagcagggatccccaggcgggtttcaccacatagcatcttctggattgaaagcagcaggggaatcctattccacatcatttcccaaatcatttctcttcttgagtagaatgactataaactatgaaggaaaattaaagtcctagtagaattttgaaaagaggaaagtatgacatgaaaacttacagaaataaatgggccaaagtaaattttaaaataatgaaagtatctcttaaagtttattaaaaatatatgtaccagtataagtggtattttcaattacttagaatttttggctcattatttttggcttcatattttaagctttatcaatgatacatctttatattttttctagtacaggaaaagcatgtcacaattttagaaaaaatataaagaaaattgcctgctggattttaagaaagtattttttggtgattcattacttatttcaagtataaaaatattctgatcctcagagggtcaaataaatcagtgtattcagcttgcttctgagccattctcctcagaagcccgagctattttttttataagatacaaaaacaaatatttcctttgaattcacatggtttgaagatatgtgcccgcctttccattctattgtcctctgactgtatcagagcagggataaaaaagtggaactggcttaaagcattatcaaagtcttaatggctggaagcaaaagtgatgagaaagagtatgctgggtaagcaaacctgcaccgtatttttcagaacaaatccctgtaccctaagcctattttcaatgtgtagtatagtgtatacatggaaaatgaataaaatctatagaagcagaaggagaaatcacattttgcacaatttaattaaaatcattgaggagcctacactgttattttaggggtctgacctaaaatattaccaaaacagtaatatggaaaagaaattcttgaaagtggaagaaacagtatgctgcctctttacttccagtgaatacctggactggtgacacatagagttcaatctttctttaaagtgttaaaaaaaaaaaattcaagtatcaaagtttttgccagattatcaatcttatctgattttcttaatgccagtgtttaatcagattagttcaactcttcctaaatcctatttattgccattacaattgactggtaacaaattaataaatgtaaagtgattagaaaagagtctggcctgtagtaagaattcaataaacgcaaacaacaaatatcttttcgttactattatccatagattacttgttagtcgagtttctgcatgaaaagtcttgagtatctaaggactgaagaagctgtatgaagtctgtttcatcctgcctaattcacagatgaaactaaagtccccttacacaagtaatgttcacaaaaattcaaaggtagtaccactctacttttactagaaaataagcaaatcacaattagaagaaaatatgaaaacatgacatgtgagaaaagttcattgtaagttcattagaaacctgaagatgttgtcaaaatgtattttgcaagatttaagatgaaacctttaaaaagagggatgatgtctgataacttatcctatcaactgctgtacacaatcatgttatttcaggcacgataattgcatggtaacagctattaggtgttcatgagcaatagctgttgtagctgattctttctcaactgggcagatttaattcagtgacaagaaaaatactgcaaatcaactctgtgatattgaccaagtaaatatgagaataaataagtaaaaatagtccatgaacacatgaaagcctctacttaaagaataaaatttctcacgttggctggtcatgatactacattagatagttataagtatctgcaagtaatgacataaagaatcaataagttatgtcgggtaagtgttatcagtgtatacagatatgtcaaatgctgtaaacaatcaccaggaaattaattaaacagtattatatttgtttgttattgccaataaattttgtgtgattgaagccaagctttcttgctaattcctgctttaggtatattgtttattagaacaaatgtggttgagtttcacatcaacaagtgagctttattatttatactctcaataaggaagtagatttagttgacattgtcacaaaacatttttaagtcaaaacataaattcttactggaaataattgatattttttttctccccccaacttgtcaaatcagaacccttttttagtggtttggttaattatttatctgtatttttgcctttgaaatcttacttcaaaaacacattttatgcaaatagttatttgtatcaattggctttatgtgttaactatttatctactgataattatgggcaaaattaaatgccacaatacaaaccaggtaatttatattgaaaaaaaatctaatgatggacaatttatatgtggttttcctttttaattcctgtatcttttcaaaacacttataagctcaaatgttctctaaagagtgatgttgccgaacatgaacagcccatcagataatcctgaccatttcaaaatcacctcaggaaaagatccttaagtaaatcagcaggtaaattgagaaggaaaagacacaattaacttggagaagaaaaatgtaaaggatataaaataattgttatagctgagtatttgtaaagttctcatctataaaatacacttaaattatctgttttgttacagaggaagagtgaaactttagtttcttttttaaaagagaaaaatttttatttatttcttttaaagtatgagtatagatttttgttcttactgtaaaaacaaagcataccaaatgcaggaaaaatattgaaaagcacaatgcacgtttttaataatcttaacaaccagaaataaaaaatagtgatatttgcaaattttctatttctaccagcctttttataagatccaacatccatatacctttctctctatctgtaacctataatagttatcaatagaataagtagcaactacagttacaaaattgcccttcacaaggaatcttaagctgcataattagatttgggtgactatacgttagggtgatactgaggttattcttgtgtagacagtggttgaacaaaataatctcgaagactcttttaagtattcagacttcatgtactaaggattcgtgtggaaccacagtgaaaccttcctaggatggagaaaaatgaacatatataaaaggcaaactaaacaggttctgaatagtattatgtatctctttctttctttatggcttcttttatcatgttggttggttatcagcttgaaagtcaaagcagatgtcatctctcaacctactactccaatgtcattttcacagtctgttttctgttgtctataacagaatacctgaaactagataatctattttattttattttttccacatgaaagttatatttattgatttatttttatgttgataggtttttggggaacaagtggtatttggttacatggataggtcctctagtggtgatttctgagattttggtgcactcacccaagcagtgtgcactgtacccaatgtgtaatcttttatccctcacccctctcccaccctttcccttgagtccccagagtccattgtatcattcttatgcctttgcatcctcatagcttagctcccgcttgttggtaagaacatatgatgttccgttttccattcctgagatacttcacttagaataatggtctccaattccatccaggttgctgtgaatgtgaataccattatttcatttctttttatggctgagtagtattccatggtgtgtgtgtgtatatatacatagagagagagagtacataatatatgtatattaaaattggaatgagataggtataacatatatatccaagacccacatgaaacccatcacattcaatttatatttcagaaatcttattttcagcatttttaatatctgaaaataatgcaacttttagaacacttctggctttttttattggtagcaaacgttaacataatttgaaagacaatagtataaaaattacatgttggcatatatatttaatggttgagatatttacttttaatttctagcaatttcagagatgtatagcaaattgaagacgtttttctccattgtcctttcccttgatttctgcttttttaagtgttcccttatcaccaaagtttccactattgttttaaaaatatctgatattaattcaaattaattattaatgctaaccaattttgccttgcagaagtgtttgcattttaaaaagaaacgcctagaggaagattgtcaaatttcttctcaccttttgaggggcaatattttagaggatggatgacctgcaatacaagccttaagaaactactgctcccattgtcgtcaaggctagctgtgagactaatgccagcaagtctttgcacaaaaacaaatgagctcttaaagagatgattgaatgcatgtgggatccattactcaataagaagcttaagtccaaatcagtctggggctaactggcctttgcagttttactatagcaggggcaacatggtgtagtaaaaaaggcctgaagagtaagtgtaattttgtcttggtcacttattggcctcgtagtcccaaaaaattaactttaatctcttgccttagttctcttacatacttggcaactatggtgcacagcccaaatttgaggcacacttgttattatataaaaagttttattggtgcacagccacgctcattcatctatgtattttctgtttctgctcatgctctacaacgacagagttgagtagctgcaatgagaccatgtggtctgcaagacctaaaatatttacagcctggtacctcaccaaacacgttgctgcactcagctttagaaggtgccaaacgcacacagagtatctccttttttacagaacttgccttccctccaacaggttgtgtaattaatcattactctgtgtgtaactttcttttgtttgcgtcttgattccactcactcctatacacttccaatctctctaaacagttccttttcattctctttatttcttaaatgttggtgattcccaaagtttcatctctaggttacccaaattttaattgcacactttcgtacacaatctccttaccccctgaacacaagcacaatttctgactggcctatacattccattcttctcctactacacttaactcaatatgttgcaaaaatgatggagagcttttttttaaagctttttcccattaggccaaattcctaataccttatcgacaaccaaaacatatggaacactgggtacatatttggggaacaaggaaacagatctttttcactcggtctccctcttgaatttgacctatagattagacttctcacttcctgttgtgtgttaccagtttcttgcacaataaaacaaatttttaaaagtgccaagtgacctgatcctcataacacattgaaactaagagtattgttaaggttattactcaagatttaatcatataaatacagcaattatataaatatatcatactaaagtgaggttaaaatgtgctaaaaacaaaagaaaaaaatggagagatcaccatgggggtaggataagataattaaataaatactgtgaattctggatcataaagaagacacactaaccaaagcaacttagacctcattccctctatttaatagagaaaaacagcacagctctcctaaggatgttggcaactcctttaatagaaacaagctgtcaaatgcatagaaattaaatacagtcatgcattgcttaatgacatggataggttctgagaaatgcttcattagagtatttcctcaatatgcagacatcacagtgtgcttacacaaacctggatggtataacctacgacatacctggctacatggtgtagcctattgctcccaggccaccaacctgcacagcatattactgtactgaatactggaggcaattgtaaaacaatggtagttatttttgtacctaaccatatctaaacatagaacagatacagtaaaaatataatgtaaaaggtcacaaatagtacagcattttttagatcacttatcttggagggagctttcaggactgaaagttgctatgggtgagtcagtaggtgagtggtgagtgaatgcaaaggctgaggacagtgatgtacactgttgtagactttgtaatcactcaacacttaggctacactaaatttatttctaaaaatttcttcctttaataagaagtaactctgccttcctataacatttttactatgtaagcattgaattatttttaactttttggctcttttataataacacttagcttatgtgacggttaatattgtcaacttgattggattgaagaatgcaaagcattgtttctgggtgtgtctgtgaggatattgccaaaggaggttaacatttgagtcagtgcactagaagaggcagacccaccctcaatctgggtgggcaccatctaaccagctgccagctcagctatgataaaagcaggcagaggaacatggaaggactagattggctgaatcttctggtcatctttctcctgtgctggatgcttcctgccctcaaacatcagactccaatctcttcatctgtcaaactcttggatttacaccaggggtttgcagggactctttgacctttggccacagactgaaggctgtggtgttagtttccctagttttgaggttggggatgcaaactggcttccttgctcctcagcttgcagatggcctattgcgggacttcatcttgtgatagtgtgagtcagtcctcctaataaactcccattaatatgtacatatctcctatgagccctatttctctagagaaccctggctaatacagatttaagcataaacacattgcacaaatgtacaaaatattttctttctttgtatgcatatcctataagctttaatctgtttgaaatttttttagttttttatactttgtaaactttttttgttgaaaacaaagacagaaatatttaattggacttacaccaggggtttgccaagagattaactgacattagcctagacttatacagatgtaggatcatcaatatcactgtcttccacctccacatcttctcccactgaaaggccttcaggggaaataacacacacagagctgtcatctcctgtgataactaagccttcgtctgaaatacctcctgaaggacttgcctgaggctgttttacagttaacttttttttaataagtaggaggaatacactttaaaataacgataaaaaatatagtgtagtaaatacataaatcagtaacatagtcatttatcatgaccaagcatgatgtacaattgcatgtgccacttttatgactgggagcatagtaggtttgttaatagcagcatcaccactaatacacgagtaatgccttgtgctaggagattatgagggttaccctgtcactgggtgataggaatttttcagctccattagaacctgatgggaccactgttgtttgtgtcttccatctttaactgaaccatcattatgcagcacatgactgtagctcaattttcaccttctttctgccatacatacatgaccacaaatctacacactttcctctggaaaactcccaactgccttaaagcatatctgaaaataaaaattatgtttcttgtaacacacacaaaacaatttccagctaaaaaacctttctgaatgattgccacgtgcataaaacacccctggcaagtgtgaaaaaactaaatcttaaagcaagatgtggttccatattgcagctagtatttaaaattaagttgtctctctttgcccccttttttccgaacaaattcacagagcctggattgtgaatgatatgcctgtctcagaaacaccagccaactcagcattatagtttgcactactgggtttgtttgcaaataaaataaaagcaaggagaaaaactgagacataattatgaaaggcactagaatgtggaaaagagattaaaccttattaaaatatcattcctaggcattagcagcagttctataattaataatataacagttgactgcactaagtggcataacagaaattaaattttcatttatgaacaggaataatgaggtaatataaaaagattgggtttaggttcttctgctactgaagattaataattgcctaaggtctatattcagaattaagacacacatttagttgtagagaaagataattcatcaaatgtgcaagcattctttaaccctggactgcagtcatgacatgaaatgtctgcagtttccatttcaccactactggagtcaaactatttccattattgcctaacttatcataaatgctggagagaagcaaaagcaccattttcagagaaaaatatgcaatataaattggcaaaacaatttacaggttgcttttaaaaagaagcccttggcaacataaatatttagtgcattgttcttacggcagccgatgagagactttaacatgtgtgaggaaatttagttttcttgaataaaatgacaacagagaataaacaagatgtgtgaaattcctttaggaaactatttaaggactgctgtgttttattatccaagagttttacatttatttttgagtgtttagattctgtgtatgtaaaccagatctatttatcctactcttcatagcatagcatacccatgaagataaagttaagaaaactttataaaaacattgtttttaattataattgcagtatttattttataaaaggagaagtcaactaattacttatataaaaatttgagactagaaactataatatttttgtcctaaatttttatttgtatctcaccaaatgccactcagcatgattctcttatagactgagttacgtgctgcagttaggtacttcagtaaggtcacagagcagagaggaagatgacagtcattcagtgtcaaatatacagcagacactttcaatctagaacatgatcacatcttccaatagttctatatgttagatgtttctatccccttttcacaggtgcagaaagtaaatttaaaggagatttggtatcaaaggatttgaacccagatctgcttgaatgctgaacataacattcttcccactttactacatgatccagttagtctttaaagttaccaaaaagttgccaaagttaccgagagacaggactagctgtatttcctaggccgactaagaattcctaagtctagctgggaaaggtgaccacacccacctttaaacacggagcgtgtaactcagctcgcatccgaccaatcaggtagtaaagagggttcactgaaatacaaattaggctaaaagcaggaggtaaagaaatagtcaaatcatatatcgcctaacagcacagggggagggacaatgattgggatataaaacccagggattcaaaccgggagtgggcaaccccctttgggtcccctcccattgtatgggagctctgttttcactctgttaaatcttgcaactgtacactcctctggtcagtgtttgttccggctcaagctgaacttttgctcaccctctaccactgctgttccccgtggtagcagacccgccgctgacttccacccctccggatccggcagggtgtctgctgcgctcctgatccagtgaggcgcccattgccgctcctgaccgggctaaaggctcactattgttcctgcacagctaagtgcccaggtttgtcctaatcgagctgaacactagttgctgggttccacacttctctttctaatagacgcttctaatagatctatggcttctaatgatgataatgatggcttctaatagagctataacactaaccgcatggcccaatgttccattccttggaatctgtgaggccaagaaccccaggtcagagaacaaaaggctttctgccatcttgggagtggcccgcctccatcttgggagctctaaaaacaaagacccgcccacaacattactaaaaacactaataatcatgagacaatttccaaaataaaaacatattacttttaccttgaaagataagcacacacagagagacactcattcccacaactctagcttactggatatggcaaagattatggcatgtagatatatggaaaaagattttgttatggctgttatggtttagcatttgggtgccctgagtgagacaagatggtgatcttgtaccagccagtgcttctcacctctaggctctgatctaaaagtgttgcttccaggtgtttgagaaaccatttagtaataaacctaaactacagactgtaatgaaaaggtcatgttgttgcagaaagggatagtggaactcaactgcctagtatgcttactttcaactaggtcatctttttttgtcctttctttcattttgtttacttgaggtgcatgttgcacctaatttctgagttttgccacttctctaaggtgactaatcatgggtctcctggtcatcccctctgaagacactgaggcttccattttagccatggccactattcactaagccaagatctatcttcaaaatggtttgttgtctcttgactgctgtttcatactctttgtccttgtaggcttgatattaaaatttcctctactctccacttaatagggtctgaaaagaaaagagaagccaaattcaaatatttaagtgactgtacaagctcaccccattcttccacatattccattccaacttttgttccactgtgtcctcacttgccaagatcaccaacaaattcaaggctgctaactctgtggtgtgtatttctatccttgcctcacttgtcttctcattgaatacagttgactactaccttttttgtggaaacatgtctctctttgagctctggtagcatcactcaacccatgtttttcttttacatctctgctcttggtcatgctccctgatggctctataaggagagaagaatcagcagatgcaataatcaaaataatcaactcaagggagcttagttatgttttaaccaatgaaagatgtaagagaagtaaaaaaatacaaaaagataaagacaatgtgtaaacaaaattgtcaaatttgtcaaatggaaagcaggatatggttgtttagaaatatccaattgttgactggcttttttttaagtgtcgtatattttactccctcattctgaatgaagtcattgctttttggttctttcacttggactcttagtggcaattttgagtttttgtccaaaatgtctttctttcacactcactcaaaaataatagttaactagaagtacaatggtaagttacttttgattagcgttgtaaatatagttcactggcttctgttgttgtttttaagaaaactgatgttagttttaatttttttatcttttaagtaatatatttttattttcttatggctttaagacactaccattgtctttggtgactgaaaaaaatgtggatgttataatccattaaaagtttgaaaacctgaaaaacaatgttttatattgtttgtgaaagtttaccacttccatttgttctcttatttatttatttatttttttgagacagagtcttgttcttgtcacccaggctggagtgcagtggcacgatcttggctcattgcaacctccacctcctgggttcaagagattctcctgcctcagcctcctgagtagctaagattacaggcgcctgccaccacacccggctaatttttgtacttttagtagagatggggtttcgccatgttggccaggctggtctcgaactcctgacttcaggtgatctgccctcctcggcctcccaaagtgctgggattacaggcatgagctacctcacctggccccatttgatctttatgtagtggtgtactaccttctaagcagtgagtgataaagcaggtaatagcattgtggtcctggctggtaggtctatttcagtcaagactttagcatggttaagtttaacagcctgctcacctaaggaaaaatttgcaagagttgaacgtgatgtcagagtcccattcaaggaagctataataaacaaaggtacacaactgagatgttggcaaggaaagtgttataaaggagaggtctcagtgaaaaatatttattacctactacgcaccaagcatcctcccagaaccagggataaatatatgaaaacaacaattcccatgctcatatgaagcttctgttctctgatgttagaggtggaagcaacaataaacaacatcatagaaagatgttgtgtggtcataaattagggcagaaataaggaagaaaataagggaggataagagagagaggtttggacagtgtaatgatggcaggacgtggggactattttaatgcagcagacagccccttgagcataatttgaagggaacaggggacaagccctgcagacaactgagagaaaatattttcagcagaggagctgacaagcacaaatctcatgagagggttgtgtgcttgctatgtttgagaatgacaaggagcccaggatgggagaagaaaaaaagagagagaatggtaagaaaggcgatcaggtagttggaaatagtggcggtaggggtggggagggaagttgaacagcagtggtgcaaatgaagtagggcttttaagtgtgaaaagaaaacgtcagaaaaattaaatttgatggagtttaactgagttaaaaaagaagaaacgatttgtgaagcaggcagcctccagaatcacagcagattcacagagactcccggggtgcctagtggtcagaacaaatttacagacaaaaaaagtaaagtgacatacaggaatcagaagtgaggtacagaaacagctggattggttacaggttggcgtttgctttatttgagcacaacttgaacagtcagcagtctatgagtggttgaagaatggccactgggattggccaagactcagctattgttacaggcaaatactcctacgttaggttgtcaatcttgtctgcctattaagctaagttgtagttcgcccaaaaggacgcaaatatagaaatctggagtccttctcaggccatatttagttcactctaacagaaggtatagtagaactttagcttatactcaaagaaaaaccatgggtgagttattttgtattttgttttctgacatggagtctcactattttgtccatgctgttctcgaactcctgggctcaagcacttttcccaccgcatcctcttaagtatctgggactacctacatgccacacactggtggttgagttttaaacagaggggaaaaaaaaagatcatatttgtatttaaagaatgattatgactattgcgtgtagagcaaatcagaagaataaaataatggagtcagggaaataacaggagcattgtaacttaatgagtctgtggtcacccgggtgacttgccatagacacctcaatcccacatacactgaaattgctgcataggctggaattgacacaacagctaagtaaaacaaaaattgagactaggagaactgcaatctgcttctgatgagaattgatctggaaactatcaaacaatgtatggcaagggaagttggctatatagcaaacccagacacctccgttaggataagtaataattcagtgtgatttttctccagcaaagagtatctcctccgaatatttttctcctggatgcctaaagttgcaaaataaatagtttgtaactttcatataaaattttgacctttctttgtagttcacttttagaaatcaaatatccaaaagaatagaaagacattaagctgcctttgttgcgaatgtacttatataattatagaaagaatgtttaaacaatttttaaaataaaaaataagataactcaattttaaagagggcaaaagatttaaataaatacttcactatagatggtatatggatagcaattaaatgaatgaaaagatgttcagcattattagtcattaaaaaatataaattaaaaccacagtcaactactactacatatctgttggaatggctaaaattaaaatgaatgtccatactaagttttaattagtaaatagaataactagaactctgatgcactgctgatatgaatgtatgattgtacaactactttagaaaacaaattggaattttttcaaaatgtttaatgtatacttaatgtataacccaaccatttcactaaacagcatttacccaatagaaaggaaagcatatgttcacagtatctttatgtgaagcagaataaacccaagtgtgcatcagcagatgaatggataaacaatctgtggtttgttcacacagtgagatactacttagcaataaaaataaatgagttcacaaaagccacatattgtatgaatcaatttatatcaaatgtccagaaaaggtaaatctatagatataaaaattagattattggtttccagggtctattcagaaatgactatgaatggatatgaagtttcttttggaggcgctgaaaactgttctaaatccagatagtgttgatgcttgcccaactccgtgaatgtactataaaacactgaattgaacactgtaaaagggtaaattttttagtatgtaaattatttcaataaaggcattattataaacaagaaaataaactattgatgtgtactacatcttgaataaaacaaatacaattttgctgagaaaacaagctatatttttaaaaagtgcatactacatgcattaattcacataaaattatagaaagtgcaatctgttgtgacagaaggtagaacagttcttgcttgtggaagaggggagcggataaaggccagaggtgggaattaccaaagggcactagaaaacttacatgtgttatggatatgtttattatcttgattttggtgatagtttcatgagtatacacataagtcaaagtaatcaaatcatacattataaatatgtgcatcttatagtatgtccattatatcttgtattattgtacaacataaattatacatataaaataccaaaagtatgtagacaaactgataattatttttactaaggttaagtaattatttgtgaactacttttaaagtgaagctggtgccatttggggatcagatgttttaattcctaattttaatccttgatgatagagcgtaagtgcccatgtggactcttcccggggggagcccacaaaatagtcagaaaagtactggctctcttacatagtgcctgagtagtgtactgcctttatagtttgctcagctcctttcatctgtaatagtccacatggaagacaacatagaaccactggaatccctaaatgatgactatacagatgactctcagtaactctctttgtgctataaatacagtataaaaataactacactgtgcttcaatatattcagttgttgagtaaaagcaggataaggccttaagagaaatggatttcttgacagttagggtccatattatcaaactaaaattaaacagcaatttccccacaagccaatcatgcattagggagaccatcactgttataaattatgtaacaaggacagaaaacatggttccaagaaggttctaaatgcttcatactaaatgaaagtttaaaatcacttgaattttaagcagagtgatatagacctggggggtaacaaagtcgtttccaagttctgatcatacacaactgttgataaccaaatgtttaacatgggaaatagaagagtgaaataaaggtctatagttgcttttatttacattggccatatttatctcacaatagttacttgactgccattgtttgcatttgtttctactttaaaattttaaaggagcagcaattgtctctttttatgattagcatcaacctctgcatgggtttatgaagaagatgcattgctttgttaaggaaggatgtattacatactgtaagcttagtattttaccaggaaaaaaatagggtaaagagccatgtaagatgtgctaaacatatgaccttaagatgctatattaatttaaagaatggagacatggagtaaataatcattggtgaaagtaagccctttaacttattttaaactctgttatttataattcagcatttttcaataagcctttaggaagctttcactattttgactatgtctctgttataatattaagaatggaggttcatagagttttacataacatttttgcaactataagaaattaaacattaattattgatctgtgaggtttagtttgacatatctgtcaaacatatataatttgcttcttaatagaatccagtttaatctctaatatttaaattacaatttactttgcctttatcgttggcttttacctttcctattattcacattgtctctttgctatgtttgctcctcatgtgatgaatttctgaccttttaaaaaaagagcatacacatttgcaaatttcatgatccaaatagtctttctgagatgagtatttcaccagttttataatttctcaattgtaactgttaagcaaattacaattaaccatctcccagtttgctcaaccatgtaaatgcttgttatttttgttgattatataaagcagactttttattcttttggcaaacaagatagagaggctataaactaaacatcagaatgggccataaaattttttctgttaaatcaatttccattgctggcctcagaatatacatacaatgtagcttagatatatttcttgagaacattataccaatttcaatacatttgcttttctttaataaaaaatatgtgacagttgtactgaattcaacattcagctggcagggattaccaatcagattcattcaaagtgctcttggggtcaacttacttttcaggagcaaataaatctagcagtgtgtagcaagtcttcatgaaataaaattatcattttttatcgagaaacagtaataaaaaaaaacttgtctgtaaaaactactcctgtagtcccagctactcaggaaggtaaggtggggggatgactttgagcacaggactttgaggctgcagagagctgtgatctcgccgactgggcaacagagcaagaggctgtctctaaaaaagaaagaaatcctcactggctgtagtataaaaagtataacattaagaggaacagcgatgagcctggaaatggaatctatgtggatttaaagacattgggtaaatcaggataaaaaaattctaatgctggtcttaaatatttaaaatattgatttacttgatcacatagctgcagagtttatcagctgtttcttaaccaatagcaagttcaattattagtgtcgaatcatcaagttcactttctctatggacaaaacaatggagaaatctttggaggttaaattctagttccacgaattaattcagaatatttggataatttccaatattatgtctttgatttgtgttgaccaaggctaaattactctccgttggtttatgtctgctggcaggaaaattaattagaaaaccatagtcatggccatcccagtgccccaaatgccattcagaatgttccagaacacttttattaaaaacagaaaatctatcaagttcagccttacgtgaataaaccacttaagtgtttaactcatctgtggatgtctgatataatttgatttgcagagcacatggggaaaggatataaacagcagacactatgagctataatatatattttctttctaatggggcattagttgtcataaccttttgaatgtgtgtttctttatacccaagcagatgtaccttacctatcccaaccattgaatgtgtatttcaatttacttttcctgtaggaaaaaaagatttgtattaatcctgaattaaaccccctgtcaataagcagggtgtagaaatgtggttaatggctggagaatatttaatccaaggccttacacaaacatctcctactgcaatcactcgagctaccttggaacttgattaaactatgaagaaatgagacccacaggttcttaacacatcactacttcctgtcacatcccactaactcaacagtacattggaaattatgacttacattggtttcaattccacaagattataggcacttttaggtattatcagtaattcatatataactggaatcacaatttcctcacccagaggatgggtgatgccagaggattatatctatatttttaaaggtctgtatcttctataatctgtagattatgttcatatttaagaatctatattatatctgctttatacttccaggcactgatgcagggaattaagataaacctcctgctgaagatgatcatcaggtaaagagagttctttgattttggtgaaacattatataactggtcaccagattttttggaatggagtgcccttggagctttaaaaaaaaaagagaaagtagagaacatgctattaacttcagactagggacatttgaagtcaaatttaaccacaaagtaaatattttcttggtctgcaattaaacatgttggctcttattaacattattgcttcttaaaaggtgtgtgtgtgtatgttttctaaaatttatttactagaaaattttcagtggaaagacaaagcacatctaccctggcaaagtagcccatggctgatcaaaattcagtttaagtagatttataggttccccacagtttcattgacaactgaatcattcttctctctggaatgttacttttctttttgaattgtcatgatatcaagaaggaatgaataaggtgaaatcgctgcctgtcagtaatgaataggatttttcaaaaggagtttggaaattttccctagacagttggaaaaatgagaggattgatattgaagcaatcaagtaagcattatatgtgtgtatgtgtgtgtgtgtgtgtgtgtgtgtactttttccttgtactatcaaaaaatgtatgtttttatgttttcatccagtttcaaattgtatctttccatattgaaaggtcctctgtcatccccaagccttcagtcaagtgtaccatgtagtcacaatccttgtgtcaatggaattctggacaattcactgatgaggatatgaaagggagttttgaagcaatgtcctggtagcagcatcttgtcaaatgaatatagtcttagagacataggcagttaccaggtaaaagagttggaagcagagctgagagcagtaagaagacaagtccggactgtaagtgaaacagaccatttggtggaatgaagccttagaggcttgtacagtggtagatagtaacctatcaggaagatagagcagttacaaattagatatgaagaacagtgcctaaaggataaagcaaatactttgttcagatgctctatcttgttcttccccattgattacatctacggtgctgatatcactgtctcttattatttctttatgtatattctggttcccagatttagccactttgaatactctcaggtagagaaattaggaaacatgtctataaacaactttgctgtttccctgcacgctttctccactttcttaagagtgctcattgcgaagtattgctcaaaatttagctaccctaagtatgcccagtgaattaagactaggaggtttcgtttgtgaaatcaaattgctctgtctttatatgatcttttacctttttatcttatcagataatgtgttagcaaagtgctgcaataatgaaatatcaatatgtatttatggatctcactgagaaaccttaaatgaacccaagcagtacaaaatgatttgtatatagaatgttcattgcctaatcatactcataaagatgagtgaagttttaatcgattaggtttattcgattcatgagccatttaaaagtttgccttgtgatataaaatgcagaataaataatagtgcacagattagaggaattttcccaataaaactcaatgggttagtttgttgcacaaaaaataaacttgaacagaatgaaaagaaatatagtgagccatattctattcctaaaagcaaattgttttctaatatgatgaagtttcagatgtagaaatgataattcactgtgctacttttaggaaagatatttgcattttgtcatttacgttcagtggaagttggcaattggcattgaatttcctaattaatccattttacatgcattagaataaaatgcaataagtctaagtgttcttatgaaacatttatgtggcagatctaattggccactggtgtaccaattaaatacagcttaatacttctggaataattacagcaaatatagcttttaatacatttttggacttaatgaaaataacagaaatattcaaagacatacaacaaaaaaacacggccgataattagaacaagaaacttgaaaaggggaaaaaaaacagagaagggaccagggtccccaggtaggtagctatgactaagggactaaactatagatatagtaaatgtttggaggctaagcctgagatacctgccttaaaccaaaaacactgaaagaaactagatagatcccaggaggacagcaagcctctagctctgacaaacaaaaactcaaatgctccttggatgaaagaagcattttggccctcaaaaatgctccagattaagttcaattaaatatgtgtgtgtatatatatatgcacgcacacatatatgtttatgtatatatgtcttatatatatgattttagacatgcatgggagaaaataaaacacaataatgagaatgagaaggaaaaaataaaatcagaaacttctactctcaggcctactctatttgaaatatatcagcaacaggctatgactatgtataaaacatccagtaggctaaaaggtgaaacttaaaaattctcaaggaagaagtatcattaatattgaccagatagattaaaacaaacgaattcacaaatataacagcagaacttttagacaaaaaaaaaaaaaaacagttgatcacaatgagttgattaaacagcagtcccaggtgaagataaaaaatgacaaatggaaaatggatttggaaaaatcacattaaatttacatagggaatacaaggaagccccttaatattaaataatctaccaaaatcctacagaaatctcatgaataatgataataggctaggtgcataccttgctaagatcaggagcatgataaggctactaattatcactgcttctactcaaccctgaataggaaatgcgccagtgttgagtgaaagaaaataacaagtgtatgtgattgaaaagaagaaatagttgcacatgatgattgattacaagaaaatccaaaagctctacagatctacagaaaaattattagaattaatataaagcttagacaactcaataaaagagcaatttatgtaaaattaattttatttttatatgtgagaaataaacacataaaatagtattaaaaattatgctgttacaacagtatgagaataacagaatacatttatttttttaaaaagtatgataaaagtttgatagacattgaagagaagttaaattcatagagaaatatactctcttcctgagaaaaatatatttcttaaaaatgtgattgtctccataattgtatataatgacttaatagcaattccaataaaatctcaaattgtgtttttttcaagtaaatcaacattctgaatatgaaaactgatatggaagatgaaattttgagaatagctaagatatttctgtagaggaatgattaatgtgtaaagtatttactgtaactgattacttatattgaattgtaatttatgattcaaattataaattatagattatacatttcaagcacagttattttggtacagatatatttttttaatggagcgatgaaacaaaactggaaagaaacagacataggactaaatttggcatttgcatttgcttctgtttgaaaagtctctctccacttcctcctggtctctccctaaatgccacttcccaataaggactcttccatgtatatcctatcaaaatttacatgcccaaatatctatatgtagttctcttagcaaacataaaatataacattctttcaagtataggttacaataacacacaaaagcttcatcaagaaatttatttaaagcataatgtgatatttacacaatgaaggcaaaatcgaacaaccacgcccagaagcaatagtttgtaaacctttcatttaaagtaacggttaatatttcttaatacattaatctcaggttctatttgaaatgctccagtttattcatgtttattcctctctcttttagttaacacctttagaataagcaattttctttctcatttccgggtctgtgcacaaattgtaaactcacttcaccagcagaattggcttttccttctccctcaatatatgcaaatttaacccttatctaagctctggctgtagacgtcactcctttcatctccagcctttaattatatcccacatctgcaccaagtctggcactgaatggctattttcccagcctcatgccaggccttgggtaccacatttcactccatccatttaaaatcatttattgctcctattctttgtttctgccttcctgacatgtacccagactctaacttctgcaatatattagtcctttaaaatcctactcttccttccggattcatttagcttctcccccagtcagtatttctccatttcctcaaccccaggcaatcatattttagcacttcatttattcattatgtaactaatgtatgcatgcataactggcacaaaataagtactcagtaattgcttgttgaatgaaaaaatgcttgttgaatgaaaaaaattgcttgttgaatgaaaaaatgctcaacatcactaatgatcagggaaatgcaaattaaaaccacattgcaataccacctcactcatgaagaatggccataaccaaaaaatcaaaaaataatagatgttggcagggatgcagttaaaagggaacacttttacactgctggtgggaatgcaaactggtacaaccactatggaaaacagtgtggagattctttaaagaactaaaagtagaactaccatttgatccagcagtcccactactgtgtatctacccaaaggaaaagaagtcattatacaaaaaagatacttgcacacatatgtttatagcagcacaatttacaattgcaaaaatatggaaccagcgtaaatgcccatcaatcagtgggtgaataaaggcattgttttatatatatacaccatggaatactattcagccattaaaaaaatgaaataatgcatttgtagcaacctggatggaattggagaccattattttaagtgaagtaactcaggaacggaaaaccaaacattgtatgttctcactcataagtgggagctaagctatgaggatgcaaagacgtaagaatgatacaatggactttgggcacttggggggaaagggtgagaggggaatgagtgacaaaagactacaaattaggtacagtatatactgtttgggtgatgggtgcaccacagtctcacaaaccaccagtaaaaaacttatgtaaccaaacaccacctgttccaaaaacctatggaaattaaaggaaaaattgcttgttgaatgaataaatgagtgatttttttgtttgttttctaaaggtataggctggaggtcaggaaccaattatattttctgggtatttttctgtgcatctaacatgatgctaagtatatggaaaacactactgtagattattagaataaataaatgtatgaattctgtttctatgggtgaatgaatgtgtctgtgtgtgtgagaaagacaaagacagataaaggcaggaggaattacttgttcacccttggagaaggtaatacaacattcaaaatgacaagctttcttctagaagattaaatgccagcatactatgattaaactctttgttttcttttataagatacttagatgaaaaagttagtatttcacttataaaagttaagttttatatttaacttttggacatttgctgcctatgtgtctaatttattttccattttgttgtctgtttttcaagatgtatatttcagaataacatttcccataaactttgagttttgattttgttgtttttgttgttttgttttgttttgagacggattttcactcttgttgcccaggctggagtgcaatggcacgatctcagttcactgcaacctccacctcccaggttcaagcaattctcctgcctcagcctcctgagtagctgggattacagggacgcaccaccacgcccggctaattttgtatttttagtagagacggggtttctccatgttggtcaggctggtctcaaactcccgaccttattgtctgaaaattaaacttatatgtaactgaacatagtattcaaatatttgcctttttttctatataaatgacttatatgtttctgtaggagaaagtgattctgacaaatcagtgaaatgcataaagaaaggacaaagagacaggacatgtcacaaaagatttttttgcgctacgtcacctctgtgggttttaagaggtgagtcaaagtgcttcaactctgtcctctacagtagttgcaatgataactaattctccccaggtttgacagcacaaaagccctcccacaggtaccctgctgtaccaatggtggcttatctcactagaaagttgctcctctgtcaacattgggcgtctctggaaggagagttggaccactctttcctcacttttctctgtatgtcaaaactgaacttgataatttcaaagcccagactctccttgcagacccatcctcaaccaggaaacttccaggactacatgttgtccaagtagtgaaagtgccctataacggaaaagagctgacagcatatgcaaacgtgacaaagcataagagttttcctggttagtcatttgctggctttcacatgttcataataagcctcataccttcacagtgtgtggtacagagtagacactcaaatatttttgttgaatgaatgaaagtattacatgaggcagaaatttgagtaagaatagatgtatatgcaaacattctgtggtcactatttggtaggaaaagggaaaagttaatcagtatgtacccactattcatccagctctgttgggtggtgaatgacagtgtacggttgctgtattaaataacagcaacaagaaaacacaagtagtttttattttggcataaacttcatgttactttctagttggttaactcaatgccttgcatctgttttgttaacatcttcttgaacacattgtatttttcacatttaatagtgtcaaggcttttcacagtagggcttacatttgatttcgtcacacaatagacaattcctaagacaacctataattccaatccattaggctaatggattgtagctgctgtgagcagtgggcctgtaatcttttgataataaagtctagtaagacataaaatataaaaataaataaactgaaaggactagatttagctgacataaatattttcttttttccttataaaagcctagtaaatagtcacagtcaacagaatttttagaattacatatggatacatatgaataattgcatcacacaatattgacaaagctccaaaagtgataagtttttgtttgggaagtcttggtaatgaaaattctttactttctttttttcaatttttacttttaaaagcctattattattacatgtcattgcttatgtattacagcatttatcattatagattgtattcaagtggatattcttagaccacattcttgaggcgttattagtataagaacctgcctatgggagaagtggacctaccatgaaagaaggcgaagcatcatggaagagaattggtattttacatttaaatttttaatttatctgagtcactccactgaattgcagaaaagcaaatatgtccccttaaatcaatttcatggagttaaaaaagaaatgttcttataacatctggcttctgttttcagaaagctgaaattctgtctgttggagaacatggggaggaaatctggaacacccaatccagctggtttagccacctaatgaaccattccattagtaactaaagatctttgctttgttcatgttacctgcattagaacctgaactccttcaaagaaattctctttctcttgtttctatagaaacaatgctgctaaaatatattacatatcattaatattttgaagtctatgattaataaatatgaaaaataattattgatgttcattcttaaagcttcactgtaaacataactgtcttcatgcttcatcaatgtccctatatacctcgcttttttgataataatgaaaaagaagtagaggttgtaaaagaaaggtgagggtagaagaaaagagcagaaaaggggaaaaagggattggaaaggggaagaaggagagggcacaagaggaaaggtagtgggagaggaggaaagagaagagaggaggaaaggagaaagtggtttctgagggaaggagcattggaggccatgattttgacccaaggctcatttgcatacataccataaggccttggaggcacgtgtcatcatttaaaggatggaggggatgtctttattacaaggtcactatgtatagatgcagttgtgcagtgaaagtacttagatgttgagatgccataaatctaatagcccctccccgcaccaggcttaagatgtatgttttggtgagaaatttactccaagccaggctaatgaagggaaagcttagagtgaatgggaaagagaataacaggaatgcctccttgatcaccacaccagatgtacgatgctgaggaaggcatgagaagcctagaaaagagcttctgagactctcagatgctggaaggcatcactggaacagcttccctcctcaggaagccagagtcagcagtgcattgtttgggctctgctagttccacatgagccaggataagtagcttgggaggcggcagagctacaaggtttccagcacaagtggctgctggtggggaactcagctggaaccaccatgaccagctccctggctagagagtgcaagtgacctatgtctttgcctgcagcagttcctgggtatcagggagactggcccactccctcagcaacaggtcagaaaagaactcatccttggagggaagtttctagggagggaagccaatgaggagggcccttatttctgtttctccctgggtctgcccctggtgctacatatcagagaagaaagacccccacggggttgtgcaaagagggccaacagagcacctccaatttattccaagggcaaatggctagaggcacagacaaaaatgttgggcacctgagggaaaaggatttaaggccagagtttggcttcattgatgtctggccctcttcaggccgaaatttgtgtacagctacttctagcaggggtgagatcaccaggagaaatgtctgatgatgaagtagccaggccctccccaaatccaggagcaatgtctgcatgggccagttagtgtgcagggtgggaggggcagagcacagtgttctcttggacagcattctttgccaccctccttaccccccagccacttctaaccaggtgtattagtccgtcctcgcattggaatgaggaactacctgagactgggtaattgatggagaaaagaggtttgattgacttacagttccgcaggctgtacaggaagcatgactggggaggcctcaggaaacttacaatcatagcagaaggccaaggggaagcaggctcttacatgctgggagcaggagagagagtgaagggggaggtgttacacacttttaaacaaccagatctcatgagaactcagtcactatcgccagaacagcaagagcaaaaccagcacccccacagtgatcccatcaccttgcaccaggacccgcctctaacactgaggattaccatttgacatgagatctgggagaggacacagactcaaaccatatcacctgggctatgttagaatcacagcatgtttccttggagctctttagagctccaggaatatggggccttctctcaatgagtcaatctggagtcatcatgattgtcacagctagaaaatggatttagatttgtcactcttttgttcaaatgttttaacaatctagagacatatgtattaccaaggacaatacttccttcaaattttcctcagtattgcaaataaagcgtaatttttatttagcaggcttccaggagaagctaattcccatattaaaaattaaaaactggtggctgtatctatatgtaacagttaactttttccaaaatctttttattttaatatagctaatattcataactttctacttaatccctaaaaatagattatgtttttccatgaaagttacatttttttaacaccgaactgaatccaattatcttttgatgtcagcctgtgagtagcacaaaaataaaattacaataacaattggaagctgataaaagtaagaatcttcaaaaattaactttttgtttctagtaaagaaatcttcaaggattttaaaataaacttttaatggaaccccttgcacagtatgtctacttgcgggatatcatttagttaagttagtttgaagtaaatttattaaaaatattgatttgtttttattatatttcaaattaaaatgattacataataaagtcactttcagatacacattaactctatttttaatcttttaaatatgttgtcatcaaattccttttaacgataataggctctaatggaaaaatattacatctatatttcaagtatgatctacattttttataaagaactctgaatcttttttaatataataaccaaatcattagtagcctaatgattgtccagaacaataaagctaaattgaaaaatacttttccaactgacatgaatttatacaatgaactaaatctttaatgaagttttctgcagtgatacaacttaaaaaccatcttaaagtattatatacttgacaccagaatcttttaacaatttaaaaatactctctttaaaatgagttctaacaccacctgtactgagagatactgattagaggaagaagaaagtcacctatgaataaaaatagttcagaagccactttgcaaacatttagcagtctttaaattctctagtcttttaaaaggagaaatagggattccattgcatgttatgctactatggttttttgtgtgtagatggaagacatgagctataataatggttaaatatactgtatattgaattactcatctctaatgagcttagaataacacttttatgtgagcacaaattgtatatatctaaatttaattatacatcattgaaagtatttcacctggtttgccgtgaaattcttcacctgtgtgagcttcttccttctcttttccctttttagttaacatgttttctctaagttccagaatccagaaattggtgcatagtataaaatcaactggtaaattttaactttaaatgttgtttctggattatctttcttaagtacgtcaaaatctactcaagttaatactaggctatctttagaacttgactataggacacagactacaacattcaacaggaacatgaccttccccactccattctaatagatggatgaagggtcacagatacttattatatttatccacatgaattcccattttaattgaaaagcaaatgcctgagaaaagagctagaaggttcttatttcttttttttttttttttttttgagacggagtctcgctctgtcgcccaggctactgcagtggcgcgatctcggctcactgcaagctccgcctcccaggttcacgccattctcctgcctcagcctcccgagcagctgggaccacaggcgccggccatagaaggttcttatttctaagaacctttgcaattccatttattgacaaccaacatttaaaatgtgttctattaattgggggacaagcagaaataaagtttttcaatgtaaacattttttttgtatatacaccaaaaagtttcttttggaattatgtcctaacataaattatttgtaataaaaagctgtctgatttggaaataaacacttttaaaatgcaaaattgttttgttcatatcctatggctgtcacgatttatgtggagctatttaaacaatcgtcttcttcaaacgtatctatatattatgttgagggaggacaataccttctagtggaatccatcaataaatgtatttctcaggcttgtaactaacataatgtaacatttcagaatgtctttgtccccagatgctctgccaatggaatgctccctgctgctaaaagttatgctttccacctctttttataacttgtctggcagacttggcatgaaggtgacaacttaagctaaaaatctgtcaaaacaaagaatagctaacaggcatgtctaaggctgatgtgaaaatggaacacaagccaactagaatgaaatgtatgctatatagatgcttgttcagaaataggtacatctgtgtttactgtagtgaacacatatttctgggcaaccatttactttccagatctactgcaaggttctctggatccgtagtgaagacagtccctgccctcaagaacataaacataggaacagctaacattattgagctctctcagtgctccaggaactcttccaaatgctttcatatgttacctaatattaagataattaatcctcacaataaggctatgtgataggtgaattattgtacacattttgtagatgagaaaaccgaggtacacaaagttaaaggatcttgcccagattagacagatagatactaggctgtagagccagagctcacttccaagcagaccaacccagaggctccactcttacctactcctccatcctgcctcttttgcaatgttatgaaggagatacacggataaatgcaaaattccaacatagaggttagagtgttaaagtataaaaagaatatttgtggttttgttgcacactgtgtggacgtgaaggggagtatattaaaaaaggattctcgtacaacataatggagcaggaaagtttgttcgtcccaggcaaacagaaaagtatctgcaatagtgctgaatattttgtaaatcacattgtgtcctaaattaactgaactcgagatttcattcattttagaaaaggtggtaaatagggtgttttgaaacaacattgttgctgtttattcttcaatgagttgctaacaaattattccaaatgtattggtgtgatgattaagatttatcacttacaaaccaggaattccctagaaatcaaagaacaagagtataactgtgaaaaaagaatctctcatttggctatgtatgcccttgtgtgtcatattcctgggcaacacacggttataaaaatggactcagccaggtgccgtggttcacgcctgtaatcccagcactttgggaggccaaggcaggtgaatcccctgaggtcaagagttcaagaccatcctggctaacatggtgaaaccccatctctgctaaaaatacaaaaaataaaataaaaaaatagccgggcatggtggcacacacctgtagtcccagcttctcgggaggctgaggcaggagaatcgcttgaacccaggaggctgaggttgcggtgagctgagatcacaccactgcactccagcctggacgagagagcaagactccatctcaaaaacaaaaaacaaacaaacaaaaaaaaatggactcacctcaggcacaaattacctcaatcaaaggttgtccctattagtgagtggaaactaattcttcacccgtaaccactatctgtgtcctgtctcctgagtaaccctctaagaacagaactacagaaatcagtcctatgtcttccctctatgagcccagttctctggctagcccttgtctacctgaatcccacgttaattctccaacaagaatagaatctgaaaaactaaaatattggaaatcttacctagtttttcctcctacatccctctgaagctggatcctttaatgatcgatcacctgaaagaaatgtgatgtagaaatatcaccagaaaatatgaaatttaagatacaatgcacttgctatggctagataggtatattggtataatcactttctagagcaattttacatctacgacatttgaaaatgcccaaagcttattcagcaatttcacttctaggtatgaaacctggaaaagctgtcaagagtttgtgcataattgtatcataatattgtcataaaataatctaaatgtccatcaacacagaaatggatgaataaaatgcagtatatttatgtggtgaaataatataaagtttaaatgggaaaaacaaatccatatgcatcaactaggtagatatccatattataatattgagtaaaacatttattttctgcttaaggacacttatagaaatgaaaaggtagtgttattatttatggatatatatgtataatatatacatatacatctataccttcaaatttctttgaatacaagaagctagaatatgatgacgaaaatcaacttccaaacagttttccttctgggaaaggagagaggaaaattggactggaggaggaacaaagaaaagttaaaatattatctataattttttttatagaattattctaaagcaattgtgatcaatcgttaaaattgatcatgatgacttcatgggtgtctgtaatgtatattacattctgtctttctttttaaaattagaaaggaaaggcacacagcccagtttgaggataatgttgaaggcctggaatagagggcttgggttgcttatgttgggagccatctctcctcttttctcctttgaactcacattgaatttcctctacttgtctttaattctgcattgattagcccagtacaccttttactttgttttcattttatctctaaaataattttacgtagtgagaaaggcaggcattactatggcattagtttccttaatgctaataaaatgaggtgactttgcaacatgcatgtactgataggccaacctctggattaagtctaggactggtcatctttccagtttactctgttgagcttgtcatagaagcaggtgtacaccacgtcagagtggtagcattaacagcagttgtagcttttgttgttgctgccacagtcttgttaccactttatctcaaatacggctataaagcaaatgtattttagaacactctccagctgttttgtgccgcaaagatacaaggcactgggaggaaagcaatccaccataacggtttcttggtggctttctccaatcagtattacataggtagggaatttgttttgactatggtatgaggtaatgtattattttctggcttaaaaactgacagctaaaaggggttttgaatgaaaattgtgacatttacagagagagcaatgatcttatacagaagtcaggtggtggcttttttttttttgccattctgacagacagaagacctacagtgaagttatttttttgtcttgttaaaacaaataactgaagtaattcatactttttttctgccctatttttgctttgtgtacaattaagtattaaaagacaatttttctattgggtaagatttaccactgtgtgtattgatttcctttgaagttactgcaattgtctaagctgttacaagtttttatagcaccataatgttcatttaaaatgaccaaaaaagagtaaggatctcaggcaaatataattatagaagtttacaccaataatataataaactttggctttaggagaatgctctaaaattgcctttctatacatactacaggcaacaaaaatgctataacaaagatattaatttccctaggacattcagcctatttgcctagaattttattgttgaacatattgctaaatattcagttgcaggagtgtttgcatagtatcccccaaatttactattttaagtggttcattaccacctactgtattttgttagcttttgcctgtataccctgcagttatagtctaaggaaagataaataaatgaaagcaatagagattcatggttcatgtattttaaatatttgaatggcaagttacagctgcccatacaaatttatagagacaggcaatctcagcactgtgacggaacttcatataaatgtcaacaggcattcaaaggttgtactttcactaatttcacaatgggtaagtctctcttgacttcctgccttctgaaacagttcgtttgatgccttcctgactctttacaccctcggcaaaggccgcggtagtaaaggtccttccaggactggcatgtggtcatgaacagcctgtgtgggcctcatatagtcccagctcatctggcaggattgggatgaatgtgatgctgtggccaaatgttactttaaggggccataaatgtcttagagtatattgctttatttccttgcctatataagaacaaatttacatttcgggaaatattagaagattttttttctatatttcctaactctcttttttttcactaaagttctaatgtctagctacagaaatttgatgtagatacccaaacatttatgtctcttatatctttttggggaatggcaaagtaccatttttaatgtttttctttctttttttgagacagagtctcgctctgtagctcaggctggagtgcagtggcgcgatttcagctcactgcaacctccacctcccaggttcaagcgattcacctgcctcagcctcccaagtagctgggatcacagacacctgccaccacacccgacttttttttttttttttttgtatttttagtagagacgaggtttcaccatgttggccaggctggtcttgaactcctgacctcaagttatctgcctgcctcagcctcccaaagtgctagaggattacaggcatgagccattgcgcccagcctaattttttttttttatttttgtggctacatagtaggtgtacatatttatgggatacatgaaatactttgatgcaggcatgcaatgtgcagttatcacatcatgtaaaattagagtatccagcatttatcttttgtgttaaaatccaattatactctgttatttttaaatgtataaatgaattattattgacttcagtcaccttgtgctatcaaatactaggtcttactcattctttataactactttctgtacccattaacctctacttgcccctacccaactgtccttctcagcctctggtaaccattcttctactctccatctccatgagttcaatcgttttattttttagctcccacaaataaatgagaataggcaaagtttgtccttctctggcttacttcacttaatataatgacctccagttccatccatgttgttgcaaataaaaggatctcattctttttatgactgaacagtactccattgtgtgtataagtactacattttctttttccatttatctgttgatggacacgtaggttgcttccaaatcttggctattgtgagcagtgctgcagcaaacataggagtgcaaatctctcttcagtatactgattacctttcttttgggcatatacccagcagtagaattgctgtattagatggtagctctatttttagttttttgactaaaaatacttaaattccaaactgttttccatagtcgttgtactaattttcattcctaccaactgtgtacaaggatccctttttcttcacatccttgccagcttcttttattgcctgtctttggataaaagccattttaaatggagcaagatgatatctcattgtcatttggatttgcatttctctaatgatcaatgctgttgggcaccttttcatatgcctgtttctcatttgtatgtcttgttttaagaaatgtcaccaacatgaagaaaccccatctctactaaaaatacaaaattagccaggtgtggtggcccatgcctgtaatcccagctactggggaggcaggagaattgctggaacccaggaggtggaggttgcagtgagccgagatcgtgccattgcactccagcctgggtaacaaaagcgaaactctgtctcaaaaaaaaaaaaaaaaagtctattcagatcttttgacaatgtttaaatcagattattcgattattttcccatagatttgtttgagttccttatatattttggttattaagccttgtcagatgggtagtttgcaaatattttctcccattctgtgggttgtctcttcaccttgttgattgtatcttttgctgtgcagaagcttcataacttgatgagatcccgtttgtctgttttgctttggttactcgtgcttgtggggtattgctcaaaaaatttttgcctaaactgatctcgtagagatctcctccaatgttttcttacagtagtttcatagttagaggtcttacatttaatccatcttcatttgacttttgtatatggcaagagatggagtctagtttcattcttctgcatatgggtatccagttttcccagaaccatttattgaaaagactgtctttccccagtgtatgttctcagtacctttgtcaaaaatgagttcactctaggtatgtggatatatttctggattctctgttttcgtgggtctatgtgtcctttgtatgttttctaatttgtgattaccatgatgcttgcaaatactatcttataaccaattattttaaactggtgacaatttaacactgattgcataaacaaataaataaacaaacaaaaagcttttctaggcacatggtgcaagctgtcagtggatctaccattctggggtctggagaacagtgtccctcttctcacagatccactaggcagtaccctcgtagggactctgtgtagtggctttgaccccacatttcccttctgcacagccctagcagaggttctccatgaagaccctgcccctgcagcacacttttgcctgggcattcaggcatttccatacatcttctgaaatctaggtggaggttcccaaacctcagttcttgacttctgtgtacctcaatactttctgtgcagccccaacaccacatggaagctgccaaggcttagggcttccaccctctgaagtcacagcccaagctgtacactggctccttgcagccttggctgtagcaactgggacacaaggcatcaagtccctaggtggcacacagcaagggggccctaggcctggcccacagaatcactttttcctcctgagcctccagaactgtgatgggaggggctgcagtgaagctctatgacatggcctggagacattttccccatggtcttgggaattaacgttaggttccttgctacttatgcaaatttcagcagctggcttgaatttctcctaaaaaaacacaggctttttttttttctactgcatcgtcaggctgcaaattttctgaacttttatgctctgtttcccttttaaacttgaatgctttttaacaaaaccccagtcacattttgaatgctttgctgcttagaaatttcttctgccagatactcaaaatcatctttctcaagttcaaagttccacaaatctctagagcaggagcaaaatgccactggcctccttacaaaaacataacaaggattacctttgctccagttcccaacaagttcctcaactccatctgagaccacctcagcctgaaccttattgttcatatcactatcagcacttctttaatcaaagccattcaacaaagggatctcaaggaagttccaaactttcccacattttcctgtcttctgaattctccaaactgttccaatctctgcctgttacccagttccaaaattgcttccacattttccggtatcttttcagcaacaccccactctccataccaatttaccatattagttcattttcatgctgctgataaagcatatctgaaactgggaacgaaaggaggtttaattgggcttacagttccacatggctggggagccctcagaatcatggtgggaggggaaagacacttcttacatggtagtagcaagagaaaaatgaagaagtaaaagcagaaacccctgataaatccatcagatctcgtgagacttactcactatcacgagaatagcatggcaaagactggccaccgggattcaattacctccccctgggtccctcccacaacacgtgggaattctggacatacaattcgagattgagggggtgacacagccaaaccatatcagaccgtttattttcagatagccagtttttaagctatttctttcttgtactctatcaattctgctaagaggctctgatgcattcttcaggatgtcaattaaactttcaactctagaatttctgcttgattctttttcattatttcaaatctaaaaaaattctgaattatttctttgtcttatcttgaatttctttgagtttccccaaacagctatcttgaattatctgtctgaaaagtcatgtatctctgtctctccaggattggtccctattgccttatttagtttatttggtgaggacatgttttcctagagggtcttaatgcttctagatgtttgtcagggtctgggtgttaaagagttacctatttattgtaatctttgccatctgtgcctatcttacttgggaaggttttccaggtatttggaaggacttaggccccaagcccaaaaattatgtggttcttgaatactcgcagaggtaccactttggtggtcttgaataagatccagatgaattctctggatttccaggcaaagactcttgttttattttcttacttcctcccaaacaaatggagtctctctctctctgtgctgagctgcatggagatgggagtggggtgatgcaagcaccccagtggccaccaccactgggactgctctgggtcatacttgaagccagcccagcactggatatcacccaccgcccactttaaccagtacctggcttctacctatgttcgctcaaggccctatagctctacagtcagcaggtggggaatccaggcaggtttctatctttctcttcagagcagtatgttccccaggccttgagtatctccagaagtaatgtcttagaaccagagattagagtcaaaatccttagaaatctacctggtgttctaccctactgcagctaagcgggtcttcaacccataacttcaagttctttcctctcttccgtctcctttccataggcagaggagactttctcagtggacgccgccaacactggcccacaggaagttatgccagacagccgtcaatattcacttaaggcccaagggctcttctgtcagcctgtggtgaatgctgcctggcctgggactcacccttcagggcagtggcctcctatctgaccaagcaaaggtccagaaatgctatccaagagcctagacctggactcagggaccctcagtcctgcttggtgccctaccctaccttggctgagctggtacctaaggtgcaagataaagtccctttcacttttccctctgcttttctcaagcagaagagagtctttcactgtagtcactacagctgggaacgttctaggtctcacctgaagtaagcatatctcagagtcttacccaaggcccatggcatgctacctgggtattactgttgaattttcaggccctaagggctcttgagtgaataggtgatgaatcctggcaggactgagcctttcccttcaagtcagcaggttcccttctggcccagggtatgtctagaagtgtcatccagaagctgtgacctggaatgggggcctcacgactctctgtccagtgccttatattactgtggctgagctggtatccaagatgcaagaaaaattgctctttactttttgctctcctctcctcaagcagaaggaaaaagtcattttcattgctgtgagctatgctgtctgttattgagggagtggtagtgcaaacacttccttatctcacccagttggtgtctccctaggtgacatgccaccctagtccactggctctaagccctttccagagctaggacttgcctaggaattgcagtccttgtgtccttgactgcctttcaagattacctaggactataaaacactttagcctgcagaagtgagtcttgctgagaacctcaagttccagccactgggatgggcaattctcctcagcgagggccagcccaagtgttttctccatgggcaggtgcctgctgagctaagcacaactttgctcttgactgtggcagggcagcagtgagttcaatgccaagtcccccagtggctgtgctcccctcactccgagtgcacagattctgtctgcattccatgcagctgctgcctaggaatggtagcagagtagcatcagcaattcaagactgtctttcctaccctcttcagtgcctcttttagcaacatgaagttaaaaccaggtactgtggttgctcacctgatttgtggttctaatgacaatgctcttttgtgtgcagatagttgttaaaatttggcgttcctgtgagagggacaatcagtggaggcttctactcagccaccttgctccacttattaaagtaccttttttttcccttcatttgtgaccatcatttggatttgcttcaccaaagcacaaaaagtgtaattcagattgaagattttatcctgtattttttttcctacttcctatatctttaaccttttatccataggggagagagagaaatataatctgatacagcctattggaattacccttaataccacccttatatcagagtttactcaaatttaaattattaaattttcaaattaggatttcctattctatcctcagccaccttttaaatattcatgaatatcttttataagttttaaaattattttgtaaaatgaatacaggactctccctttatttgtgctttgttcttaactaaattcaagttttgtgattaaaaaaatcaaagtatacctcaacttctgttgcagttttcctgctttatctcactactgtacttaccttgccttacctagtcagaggctaacatatttctcttcaaaaagattcaaaataaaattctagagcaacttcctgattagtaatggggttaaaataaaaaacaatattgccttggagaaaatttctgtcttcctctttaaaatgaagcattataagacaagagagaagtactaccttgaataaaaacccatcgaagcttttctggcaaaagctttttccctgctgcgtctttattgattccttcaagcttcacatccatgttagatatatttgtaggtattaatgagacagagcatgcagtccaatggagttacacagttttaagaagtctagagctaatcaattcaacagatagaggagtgttacatttccaaaatgattttatatgaaatgagacacttttgaagtagtactaagacatgcacacacaaaaaactttaatatatgttttaaaaagaagcttaataaatataagcttttattaattaaaatttgaaataaatatctcttcagtacagaatatatgtgagatgaaatctaagaggtttagtagagagaatacatataaaattctgagtagagagaacatatataattcagataaattatgatgatgatcacctatgcaaaaatatacgagatttaacagttgattcaagatttcaggctaggaaacaaaataaaatgaatgcattgtgtttctcctttatggatttcttcatttggaattccactgaaaatgtgtgctctctactcctaagtgtatggtgtggaaaaaataaaaacctaataggtggcacgcccataaagtatattttagaaaaagttaggtaatcttagcagaaattatgaataagaatttttaaattcaaatatgaaactataataaccatagggtgtgagcaggaggctgcgaatctagatttcagaccctgaagggctgctgcaggaaaccaagaaagcaacagaggacatggcagagctcaagatatttgctgagaccaaataaaaggcaacaacaacaacaaaaacacaataaaactcctaagcagactcatgttgtagcctctacagtaaccaataaagaacagaaatagaatgcataacaagttgatagaaaagatggaataataaaatattgtgcaatttattaatatgaacattatgctgctataaaaattaactatttcaaaactaaaagtaaaatcacattcctcttttacatatgatcaaaatagatatcttacatggactaaacatttatatatcaaaataaagtgataaatgtaaaggaagaaaatattgttgaatatttgtatcatatgaaagaggttctgagcatgatggagcagttgtgtggattttcatttaataaaatctttaagtgtctttgtatgaattggcttttaaacatctacaaagcaaatgataaatttaaaagttacaatctattattgtatgtacttgaaaggaaacaaaatggattacaaaaaaaactattgagaacatttttaggtcactttctaaaggatagatgatagtcggattccgatttgttactctaaaaatataaagcaacagatatcaattgttatacacccaattagaaaatagagagaactgttgatatacataaaacacgctttttaacaagggtttggggagaaagacactcataaaattaatagaggactataaaatagtaccttttttctggatataaatttgatattatacatctgaaactagcaactccagttctgagatttatcttaagcaagtaatcaaatatgtacccaaagatgatgatggtaacagtgagaaattgcttataacaataaaaaattggaaacttgaatgcataatatcaaggtgttaggtacactaaagacagctaaataaaatgctaataaaatgctaaataaaatgataaataaaatggaatattatatagcaatgttatataaatatatataaattatatataaatttatataaaaattatataaaaaatagcttatagtcttggaaaaccccatttattaacaattttttggagcatcagtttattttgtaacgaaagtatttacatatctaactgcatatacatacaaacacacatgcattacattgggaaattacacatcacctggtaacaacagaaatacataactagtggaatttttgtaatacattttgttttgcttatacatatatttttctcaataaatatgtattacttgcaaaataagtaataaaaatactatccacaaccccagggtagaagcagctgcagaattcagttcacttccccaaggttcttccatctctagagttttaaccctccacgtgtccactgtactcaatctacgatttctctattttatttcacttttctaatgaatttcagaaggagctctgctgtgccaccagctatttatttctcctggaagcagagcctgaaactttcattaagaaaggcttattttttgtgataactgaatgataatgaaaatgagaacttttgttaaatttcaaatttatatttatgtaaatgtacaactacaataaacacagtttcttttgcttcgatttataattaatcttaactagaatattggaaaaaccgagagatgtggccatgatcacacagtagcattcttgtgtcattgcgatgctagactctacagtgaatctcttcaatatgtcacttgttcataagtagtgaactggtcgcatatcttgcttacaaaaaatcattaccacttattatctaatatagcaggctttttatattaaatagttctaattctctcaacaactacatgtaaaagataaggaaactgaggttctatgaggttaacataagcagttatgtgacttgggtcacaaaagcagtaaatcagctaaaccaggattaaaactcatatctgcctaactccaaaattaatacctccttatacatttagaacacttttatggtatccttcagcaaatcagacaagttctgaccacacagaattttagttgactgtatttgtacagatctacctacttctcaggcccatgtgttgttggctttgtaaaaatgttgccagtaccctctatgagatgttgctccagttcctcattgctgcattgcaaaaccgttctccaatatgactgatatggtttggctgtgtccccacccaaatctcatcttgaattctaattcccacaattgccacgtgttgtgagagataccaggtgggaggtaattaaatcatagtggtgggtcttttccatgctattctcatgatagtgaataagtctcatgtgatggttttataaagaggagtttcctggcacatgttctcctctctggtctgctgccatgtgagatgtgcctttcaccttctgccatccttgtgaggcctccccagccatgtggaactgtgagtccattgagcctctttattttgtaaattacccaatctcgagtatgtctttattggcaatgtgagaacagattaatacaataaatttgtagcagtagagtggggcactgctgaaaagattcccaaaaatgtggaagcaactttggaactgggtaacaggcagaggttggaacagtttggagggctcaaaagaagagaggaaaatgtgtgaaagtttggaactccctagagatttgttgaatggctttgaccaaaatgttggtaatgatatagacaatgaaatccaagctgaggtgctctcagttggagatgaagaactcgttgggaactggagcaaaggtgactcttgctatgttttagcaaagagactggtgacattttgcccctgccctagagatttgtggaactttgaacttgagagaggtgatttagggtatctggaagaagaaatttttttttttttttttgagatggagtcttgctctgtcacccaggctatggtgcagtagtgctgtcttggctgactgcaaactttgcctgtgggttcaagcaattctctacctcaacctcctgagtagctgggattataggcacccaccaccacatctggttaatttttgtatttttagtagagatggggtttcactatcttggccaagctggtcttgaactcctgacctcatgatccacccaccttggcctcccaaagtactgggattacaggcgtgagccaccacgccccacctggaggaagaactttctaagcagcaaaacattcaagaggtgacttgggtgctcttaaaagcatttagttttaaaagggaaacagagcacaaaagtttggaaaatttgccacctgacaatgcaatagaaaagaaaatcccattttctaaggagaaattcaagctggctgcagaaatttgcataagtagtgaggagtcaaatgttaatcaggaagactatggggaaaatgtctccagggcatgtcagagagctttgaggcagcccctcccatcacaggtccagaggcctaggaggaaataatggtttcatgggctgggcccagggtccgtctgctatatgcagtctagggatttggttccctgtgtcctagccactccagctgtgactaaaataggccaaggtacagtttgggccatggcttcagagggtgcaaacctcaagccttggcagtttccatgctgtgttgagcctgagagtgcacagaagtcaagaattggggtttgggaatctttgcctagatttcagaggatgtatggaaatgcttggatgctcaggcaggtttgctgcaggggtgaggctttcttggaaaatctctgctagggtagtgcagaaagaaaatgtggggtcagagcccccacacggagtccctactggagcactgcctagtggagctgtgagaagagggccactgtcctccagaccccagaatggtagatccaccaacagcttgcactgtgtacctagaaaagctgtagacactcaatgctggcccatgaaagcagccaggagggaggctgtacactgccaagccatagagtggagctgcccaaaaccatgggaactcacctcttgcatcagcatgatctggatgtgagacatggagtcaaaggagataattttggagctttaagatttgactgccccctggattttggacttgcatggggcctttagccccttcattttggccaatatctcctgtttgtaatgggtgtatttatccaatgcctgtatccacattttatctaggaagtaactaacttggtattgattttactggctcattggcagaagggacttgccttgtctcagatgagactttggacagtggacttttgagttaatgctgaaaaaataccttttatgaatttatctctctgtggcctcaatcattttgaaagttgatttttcagaatcttttctggcttttccccagattccaagtaatatatagtctttctccaaacactcaccattactagctgttttctttacttactctcttttcatactcttcaccaacacctccttcccaaacctgggctgcctgcacatggatcattcttttttcctttttatatggtctcctgagaaggattatctgttttcttatctgaatgtgtttcttctcaggaataattttcctcatgatctcttgaatatgtttttcgtattgttgttaaataatgtatgatgactaaatgcctacattttctaagaccaacaaatttttataattgtacacatatttttattttctcttaatgcaaattttcaaatggtcaaatgaagtaagagccttgctcaatttattgacctgcacttttactcctcatctctattccatgctgaagtagaagaaatcaaaggattttcatgaaatcctgtacatgatttaaaattgaaaacctatattttatatgtaatttgtgctttagtttatcattaaaatattaatcaatactttttcaataaaaattttgatccactttggttcagaagcaaatttagagtcatgtgatgacaatgatccatgcttacaggactgctagttatatatggattattcctaacaacttaactactggtggtcttcttattattcactatcccatacatttctaagtcatgttctccagctaataacaatgaaactttcatgttaatcttagctaaacttgttggggaagttatatcttctgggatgaagtaaaaaaaaaagttatagaatgcatttgcaagccatatagaaataatatgtagatttattagctttgggcattgtaactcacttttcctctattgattcaaataattcaaataattatctgagacagtttcattaaaaaataatgaataaactcaaaactcatggaatttctggatctaagtgtagacttatagtaaagttgtaaaatcaccttgcttttgtagtctgaccatgatatgcatggcaactggaggaaacgtttgaaccagaatgaagtgaacaagcaaagattttattgcaataagagataataagaaaaattcagtttttaagctgtttctctgagcaatagccaagggctataaaaacatgtctgttgaggggatcatggagacagaatgtggctgagagagacatgcaatagagtcgttgtattggtccattttcacaccctgagaagaaacatattcagaaggggaaacagataatccctctcagcagaccatataaaaaagaaaaaagaacgatccacgtgctggcagcccaggttttggaaggaggtgtttgatggtgaggagtataaaaagagagtaagtaaacaaaatagctagtaatagtgagtatctggagaaagaccataagttacttggaatctggggagaagccagggaagattctgaaaaatcagctttcaaaatgattgagactacagagagataaattcataaaaggtatttttttctttgtcttctatatcatgcaatgtttaactttgccatccacatttggctacaacagactatgtattttggttgtttgcatagatttcttcttattgtgattctgtgctgagatggatcacagaatcgctcaactttaatactgttgtaattaccatttatagctaatatctataaataagtaacaatcatgtaatatttaatatattcacataaatatacataaatcctgttccatgagaaatacaatgtgaaaaacatttcaaataccctaatgtacatagtttagtaataatactaaattaccagaaaattattggtttaatgacaatcacaacataaatgcacactttttttttgatagaacagttttaaatttcacacataaccactttcatttttatattaaaagtgaagatcctacagaaaatacaatggtaattgtgctacagcaacctataaaaaggataactagaaaatatgactttgcacgctgtatactgctatttcaatttcgtggcttatacattttaagaaattaaactttattatttcaagaggaaatttatttaaaaatcaatcgaagaaaactaaaaattgtataataaaatatagatattatatggacattcacctaaatgtgatattaataatacaaatagttgaaattgattacatagggaacaagtattcatcccataacctgtaaacaacatatctttaagagtctcatgctctactgactgagctagctaggcagtcacaatattttaaaattaaccaaaacaaatcaataaattaaaaagtatatttaagtatgtcatgtttttctaattatttattcatctatatattatttgtatatgatttatacatatatactgtaggtatatatattagacaggtatgttttttacataagtgtggggagagagaaaaaggaggtatttactactacctagtgatactattgctagcatccaaattgataggtttaaaccctagataaatgaaaaactttccaaggttattagggagatgaaccaccagaatatattcttattcttatgtaaactaatgcagtgttaacatatttcaaagcattgattatgttacagttttatatttcttcctcacaacagcaagaagagtaggaattatatactgtgcacagtgatgtttttgcttctctgaagagttgaagaataccatatttaatcacagaatatgaaatataataattcacatatgaaaaaatatgcaagacagttgaaagaaagaaatgaaaaattaaaaggcaggaagaaaaaagagaaggaaggaaggggaggaggggaagaggggtggagggagggagggaaggttgttagcaccacacaagcaaatagaacacagaagacagcactatgcttccaaaggcaagagaaagctataacttccccactaacctcccaaccactttaacctcccaggcataagcaattaggtttcaggccatcagagaatgattagtgggtgaacccagggcagcagttattgaggttaattgaagagtagaaagcagcaagattgggacactgattggtggttttggtgggagtggtggagactcaggccttgccaatgggcaatgccccagaagggaatctctgggagaagaagccagccactgcatataggctagaggacagaggccagagtcactgagtcactgctgggatagctgggctcattgaacaggaccaccggtaatgatgcccacttctaagggacacgggacacatgacctgtcattgcagaaaataccacttagcagcagtgtcaggtggccaaagaggtgacagcaaaggtgacacttactatgactataactgagcttacatcaactttcctatcagtgtgagttcctgggtcctgaggtttaaaacttaaatagagttgattcctaaaaccatctccagttctaaatacactatttaattttgtgattgggctaaaatgttgtcactgaaattacttttactggaatagtccctggaattatttcaatgtactcttactaaaaataaaatttttgactttgtatctaactagccgcatccaaagcgagttgatttaccttaagttaaaccatagccaaattatactttaagggattagtttatgtattaaagagttacatatataaatacgtagaatatttaagtcatttgtatataattatgctaataaaaagtttaacttctattaagggcctgaggaaaaaaatgtattcaaagatttgggacattggagaaatagaatgctatatccactgtagccgtatgaccaaattgtgactttatagacacacttggaatagaaaagaacccttcagggcatctgatttgaaatttcttctctagcatctaacactcctgctgatgcaggaattattacatcccatggtcttgcctctccagaggcagtcagaagcatttttaagcagctcgattagaaaaatcttccttatgttaatctgaaataattctcctagacattttttcactttctttattctagtctaaaactgtaagtccacaaggaataaattaaatgcctcttgcacaggaaagctcttggtttgttcaggaggagccctcaaacttccctgtagccttcccttctatagacccaacagcataattctttcaaggaagcatcatctgtcatgctttcaactccctttataattctaatcccctaacctctgaatgtcttccagtttgtcaatgtctctcttaaagcctgatgctaagcaaaatgttccagctaagataaaacaaaatgaatggaaaacagaaccatcccttccattattctatacattgatcaacgtagccaagatcaaattaactgttctagaaagtgtcaattactattactcctatcggtgatgcggctcactctgtacatgtcaattaatcttcagtatagtttttgaaaagaagagaaatagagactatatatgatgtctcttaatcctctattaaaatacaaaaacgttcaccattccatcttaacaggactccagaagtaatttctgctatttctggagtgttatttcagcaactcacactcaaggggttgcctttactcaatgcaaaaaaagagaaaagcaactctaagtctaccaagtgtgcaatacaagcacctgttgcagggaaggtagttggcactaaagttgggcactgaagtacagagcatctcacctttctttgttgtctccttaaagcgacccagcagatcaagattagcaccttcaaaagtgacaaatcccacacataaaaaatatttttctacaaaccgtccaaaaccaattttatgagccagatattcatggaaaaatggtgtttgttttgctattctggcatcattccccttagtcatttgaaaacaagaaaataaacacatttaaaagatttttttcatcaacaggattgaaaaagagcagcactgaatagaactttaaaaactgtgattttgatgaaggattatcttaatttcaagtaaatttctgtataataatcaagacagacaggtacataaggaaaaatgccagaaataaatataactgctaacatgcattatcttcttattcatcatttgtgtgtgtgcctaaaaataaaaatatcattaaaaataagctagtcacttgattttttgtgtgtgttctaatcaaagtccccacagtcatagtacctaccaggtctcttacctcttgtctatcattttaagtccttcatccccaaatcatgtaatcaagctagtattcagacaaccactttcctccacaggtcacttagcaatgaatgcatccattgctcgactaagattactctgagcaaatattttagagtgtctattcctagagaattgtactagcagctacaacaagaacagactcttcttcatgggctaataatgtaatacttgtgacaaactttattgcagctattaatacaagatccatactagtttctgttaattatgtctttatttacatgaaccaaagagtcagcaatttcaaataaaaaagtaccttagacatcatctgacccaattccctctctgtctaggtaggacactaaagcccagagaggcttgtcaggaagccatataaccccaaattgtctactgagtcatgtttactttcaataagcaacctaccacttctataaggtataagaagtagaattaaatatactattttgaataatgattaaagaggcaaagaacatttcctaagcattgagacatttttcaattgtgtcttgtttctacctgcgtaacctttatagaatattctccactagccacctttacctaaatgactctaacttgtctttagaactcagctcagaggtcatttcctcaaaaaagtcttctgtcacccccagcattaaattaaatgtctatgttatacagtgatatggtttggctgtatcccaacctaaatcgcatcttgaattgtataataatccccacatgtcatgggagggccctggtgggaagtaattgaatcacgatgagggttaccctcatgctgttctcatgatactgagtgagttctcatgagatctgatggttttataaggggcttcccctgctgctttgctcagcacttccccttcctgctgccatgagaagaagaacatgtttgcttccctttccaccatgattgtaagtatcccgaggcctccccagacgtgtagaactgtgaggcaattaaacctcctttctttataaattacctagtctcaggtatgtctttattagcagcatgagaacagactaatacatataattttcttgtcccacctttactcatagcatttgtcacatttataattgtacattcatctgtggttgtgtgattaacatctgtcacccctactagactcaaaattcagtgaatcagaaatagcatctctgaatttgcccattattgcacatgagctcttagaccatggttccagcacccagtaggtacccagtatatactattgcatatctagtcaacctcccaagcagacttgtgtaactttggagtaaatcacaaagtttagaagactaccagagacactgcttatttctgagccccagtttgaaaatgtttgaaagttttcttttgaattctaagaaaaaaaaaaagctgaaaaatgtccatagtaattaaatagggaaatttctttccacagtgacctctaaattaacttcttgtatctttaacctgttctgtttttgcaataacttccatactgtctctgattttcaaaagacctagagatcatggagaagactcagagaaattccaaatgcatctcaaagaaagaaagaaagaaaacagaaaacccaataattataagattatgttactttctcattcacacttcatttgcaattcatcttgacaccaactatttaaaaaatgggtgagttcatcagtatccaatcacagttctgagggggagaacatttgttgatttttttctttatttagttaaaaaataatccataacataaggttttgtggttatgtctaaacccagcagtgactttatcgtcttttttcttgctttcactcctttgagtcctggttcagttttgctccatattttcataagtttcatttctgagtcccaacctttctctttttctcccctgggatttccttatgaaaaatgtcttcaggctttttatttttctataagtatttggaaaacatttattgaggacctacaactttatgtttggtattttttatattgatgacattccaaagcttattgggtttattctataatttactcattttcttatttcctctggtattttccagtgctacttaaacattttttaaccaataaagctattttttgtaatttataagacaaaagctcaagtaactgaattcacaaaagctatcagagggttatattatatgcacattaatcctgtttaaaatgatcagcttccttgctatacacaaatttccaaatagtggcatctaggtcatctttgcacctgttctttcatcacagatacaccctcattaaaaggacttcttattgctttccttatcaccatttcctggtcatggccatatgtcaaagcaaatgttgaccttgttgtgtcaccaaatgaaaattctagaagtcaggcctttagatgtgaaatttgttaaaatctctctcttaatttaccacttgcttcttttccttcataacttatgctttctttcttttattagagaagaaagttttctgaccctgagcatttttccagttgtcacaaaaatgagcctagctcataaaatttgtcttttccaagttcattttccttttgaacatttatagctatgattctcttatttcatctttttcaaagtcattatagattatactctattaatttcatgtttgtactaagttgaatttaataaaccaatgtgctaattcctctttttcaaaatccgaataatgactgtaatttccttttcaaatatttgaaaatgctatttcagtcttctgtttgtaatgcttccttttttattgcttctctctggacagtactttaaaattatactctataaaataagatattcataattaatactttccacatgctgacatatatttaccccaaactgtaatcccagactttcaaatatgaatttttaaacttaaattttaatttcaagtgcaggtttgttacatagttaaacttgtgttatgggggtttgttgtacagattatttcatcacccgggtataaagcctagtacacttttgttattttacctgatcctctcccttctctcaccctccattctccaaaaggccccagtatgtattgttcccctctacgtgttcatttgttctcatcagttagctcccacttataagggagaacacgtagcatttggttttcagttcctgtattagtttgctaagtataatatggccaaaggaatatgaatcattctattataaagacacatgcacaagcatgtgtatatttattgcagcactattcacaatagcaaagacatggaatcaacctaaatatctatcaatgatagactggataaagaaaatgtacatatacaccatagaatactatgcaactataaaaaaaatatgagatcatgtcctttgcaggaacatggttggagctggaggccattctccttagcaaatatgaattttttatgcctctcatgctgttatcaggacaactgtggttggcagacaaaatgaacaccaaggtgtatttataaaactattattaaacttatataaatagatctcataaatgacgtccgtatctttcacatgaattatactcaacatctaatacctacttgtagaacctgaatgactaaaagcaaagcctgtggggttagcagatgtagatctgactcttgaggtatacaattctaaatcatataaagccttgaaatttaatatagaaagaaaaactctcacttgatgtcattcatatagattttttcctaaatttctttttaaggctagatgatttggaataactgataactttcctttgccacatttattcctaccagattgagttgaacacctgccttaagggcttagcttcctgttttcttaagggagttataattccttaagagatgccattattgggtatataccccccaaaatataaattgttctacataaagacacatgcatgcatatgctcattgcagcactgtttacaatagtaacaacatggagtcaacctaaatgcctatcaacagtagactagataatcagacgggtgtggtggctcacacctgtaatcccagcactttgggaggctgaggcaggtggatcatctgagttcaggagttcaagagcagtttgaccaacatggtgaaactccatctctactaaaaatacaaaataatccgggtgtggtggcacatgcctgtaaccccagctacttgggaggctgaggcaggagaaccacttgaacccaggaggaagaagttgcagtgagctgagattgcagcattgcactccagcctgagcaacaggaatgaaaaaaaaacaaacaaacagtagactggataaagaaaatgtgatacatatgcaccatgaaatactacatggtgataaaaaatgagatcatgttctttgcagcaacatgaatgaatctggaggcaattatattaagtgaactaatgcagaaacagaaaactaaacatcacatgttttcactcataagtgggagctaaacattgaatacacatggacacaaagaaaagaacaacagacactggggcctacttgcaggtggaagctgggaggagggtgtggattgaaaaactacctatcagatactatgcttattatctggttgataaaatcatctgcacagcgtacccctgcgacatgcaatttatttatataacaaacctccacatgtacccctgaagctaaaataaaagttgggaaggaaatttaaaaaaaaagaaagacaaagaaatttccaggggaaaaaagagagatgagcatgaaaaagtttattttaaaaattattattctaatgtgtattagtccgttttcacggtgctgataaagacataccaagactgggcaatttacaaaagaaagaggtttaattggacttatagttccacatgtctggggaagcctcacaatcatggcagaaggcaaggaggtgcaagtcacgtcttacatggatggcatcaggcaaagagagaacttgtgcaggggacctccttttttaaaaccatcagatctcatgagacttattcactatcatgagaacagcatgagaaagacttgccccatgattcaattacttctcactggctccctaccacaacacattggaattcaagatgagatttgggtggggacacaggcaaaccaaatcacaatgttttgcagaaatctaggaaatttaagatttttcctctaatgttagatctgaagatttttcagtttaaggataaggtcatgagacaatgtagttctagagttctccccagacagagagcaaaggttatgaactaatgaatgcctcttgttttgataaaatctcttcaacctcacttctcttgtcaaacagtgaactcgggtattgtattaagacaaagatgaaaatgtgaaattgagacatcactgtaaattgtgtgcttagaaagcctatgaaagcttcattcattgagtgcaacttggactagaatgttgcttgacgtccatagcatggggcaacaccctgtagccaatgaaatctaaatatgatgtcaaattgtctctgctctctccattttttagttatatcaggatttcaaaaaggttatcagttccaagaggaaatttataataatcttaaaagtaatatcttaaaataatattttaagtaatttacttaaaagtaaagtgagatattatttaacattatttaattcttgagatactttttaagagatattatttatttaattcttaaagtaactctaagaattaaatatgaaaatgctaaaacaagtggtgatatgatttggctttgtgttcctacccaaatctcatcttgtaactctcataattctcataattcccacatgttgtgggagggacccagtggaagataattaaataatggaagcagttcttttccctgtgttgttctcataagagtgaataagtctcactaggtttaatgtttttaaaaacaggagtttccttgtacaaactctcttatctgctgccatgtgagacatgcccttcaccttctgccatgattgtaaggcctccccagccacatggaactgttgagtccattaaacctctttctttcgtaaattgtccagtctcaggtatgtctttatcagcagtgtgaaagcagactaatacagtaaattggtaccaggagtggggtgttgctgaaaagatacctgaaaatgtggaagtgactttggaactgggtaatagccagaggttggaacagtttggaaggctcaaaagaagacaggaaaatgtgggaaagtttggtactccctagagacttgttgaatggctttgaccaaaatgctgataatgatatagacaatgaaatccaggctaaggaggtctcagatggagatgaggaacttgtcgggaaccagagcaaaggtgacttttgttatgttttagcaaagagactggcgacattttgcccatgccctagagatttgtggaactttgaacttgagagagatgatttaagctatctggtagaagacatttctaagcagcaaagcattcaagaggtgacttgggtgctgttaaaagcatttggtttcaaagaaaaacagagcacgaaagtttagaaaatttgcagcctgacaatgcaatagaagggaaaattccattttctgagagaaattcaagctggctgcagaaatttgcataagtaacaaggagctatatgttaaatttcataggctgggcccagggtccccttgctgtgtgtagcctagggacttggtccgctgtgtcccagccactccacccatggctaaaaggacccagtgtagagctcaggccatggctttgaagggtacaagccccaagccttggcagcttccacatgatgttgagcctgcaagtgcacagaagtcaatgattcaggtttgggaacctctgcttagatttcagaggatgtatggaaatgcctggatgtccaggcagaagtttgctgtggggcagggccctcatggagaaactatgctagggcggtgtggaagggaaatgtggggtcagagcccctacacagagttcctactggggcactgcctagtggagctctgaaaagaggaccaccatcctctaaaccccagaatggtagatccatggatagcttgcactgtacacctggaaaagtggcagacactcaatgccagcccatcaaagcttctgagagggaggctataccctgcaaagccacagggccagagcttcccaagaccatggagcccacctcttgcatcagcatgacctagatgtgagacatggagtcaaagaagatcattttggagctttaagatttgatggccctgctggatttttgatttgctttgggcctgtagcccctttgttttggccaatttatcccatgtagaatggctgtatttacccagcgcttgtacacccattgtatctaggaagtaattaacttgcttttgattttacagactcataggtggaaggaatgagactttggactgtgaacttttgagttaatgctgaaatgaattaaatctttggggattgttaggaaggcatgattggttttgaaatgtgaggacatgaaatttgggagatgccagggtggaaagatatggtttggctctgtgtccccacccaaatctcatcttgtaactcccataattcccacgtgttgtgggagggacctggtgagagataactgaatcatgggggcgggtctttcttgtgctgttctcatgatagtaagtctcacgagatctgatggttttaaaaactggagtttccttttacaaactctcttctcttgtctgctgccatggaagacatgtctttcagcttccatcatgattgtgaggcctccccagccacatggagctgtaagtcctttaaacctcttccttttataaattgcctagtctcagatatgtctttatcagcagcatgaaataaactaatacagatggttattattgttattgttatccatttctttttttaagtctaaggtatcacttttttgtcaggtttcaactagagaaacagaaccagcaggaagtatatattaagaaatttattgcaaggaattgtctttcttgatttgggagtctggttaggcagattcaaaatccatagggatggctgtcagaaagtggaggctgaaactttcgtgcaggagttgaagctataaatccacaaacagaattccttttggtcctgaaaaacctcagttctgctcttaaggcccttaaactgcttgaattgggtttacccaggttatctaaaataatcacttcaaatcaactgattataaatattactcacatctataaaataccttcacagcaccacctacactagtgtttgcatgaatgactggtaatgcatccttcccaaggttacacataaaactgaccatcataataagatatccattgttaatggccttaatagtaagatattaaaaagcaaccacaaaataactgtgacaaataaaaataaatatttattttttgctaccaaatctacaagtttgctgggtgactttcttggctcacttgatgttggctgaccttgcccatgattctgcacacaacagacaggttgtagcatgctgctgtagtttggccttagttggagtgactcagttctccttcatatattctctcatccttcagtaggctaactcaggacttgtccttatggtggtggcagggattcaacgagagagcaggagtgcacacagctattagagtcttaggtttaatcacttctaccacattccatgggccaaagaaaatcactaagatagccaaaattcaagacatggggaagttaatattatctcccaatggaaggagctacaaagtcatgttttatatggcatggatatagaagaactagaaaattgagaccattttttacaataaatctaccaaatctaacatataaaaaaataaaaacatataatgatttatgggtcatctaatatgttgttttaataaaaatttgatatcctgctcatacgaatgggaaaaagttttttctgctaatacaaagtggacttagaccgtcatctacatgtcacaccagtttggagtgcagtaatgtataatgtcaattattatccagcatgatttagaagacagaatgtgaaagccaagaaggcagatcgtaaaatcaacttgtagttcaggctttgtataacagatagttcaaatagaaaagaaggtaaagaattgaggcccggcacggtggctcatgcctgtaatcccagcactttgggaggccgaggtgggtggatcacaaggtcaggagattgagaccatcctggctaacacagtgaaaccccgtctctactaaaaatgcaaaaaattagccaggcttggtggcaggtgcctgtagtcccagctactcaggaggctgaggcaggagaatggcgtgaacccgggaggtggagcttgcagtgagtcaagatcgcgccactgcactccagctggtgacagaaggagactccatctcaaaaaaaaaaaaaaaaagaattgagttcacacaaaaatgagttgaaattattaggcattaagaaaaactgacagacgttaatgaaatggaagaagccaagggaccagagatcagagtgtgggtgaaatgtgtgtattgaggccagccctgccttagcctttgtgaggcctagagccagagtacacatgatgttccccacactagatacctacacgtttaaaaattataatgaaacctagcaaattgttatataaaatatgtctactactcatctcttgattaacctacctttatgacaatccagaagggctggaggaccacaccggaatggacagcacaggaagggccagccccagttctcagcctgccatcttgtctcccggcctgacttcatctcataccaacacatctggtccatcctgtgactcagcatgcagtctgagaaggaagtacagaggctccaagtgggcttttgcatttggccccatgaaagcctcagcccatcagaaggcttgtagccagaggagaagcagagaagggctttttataaaggtaaactttttgcctaggactaagaggtagtattgtagtaacaaggatttgaagaacagaaatctgtggaatttaaaatctaatctccaaataattaaagcgaaccataaaatatatgttcaatgtacttggttgctgaagtaaaaataagataatattaagattgaggcaaatcaagatactggataaagcaggcccacaggtgaacaaacttagggatactgaagggccctggtcaagagccaaagatagaataagggggaccctgacatatcaagtgtcaaagactatgatgaatgaaagaaacagtgaggttcaagagagggcagaatgagtagaaatgatgacatgaaaatcctgtatcaccaaatggcggactttagcacaggtggatttgggagaacatggacgtggaatcacttggaagacacatgaagagcaagaaaaagactgttgataccacctcctactgttatcaagagcacttcacgtgaaaacaagcatccgttatttaaaggctggggaagaaccaagtttcagattataaagaaggtaaaggaagcaacgagagtgaagcaataggaaggggtaggtttccaacgctctgtggtaatggaaccatgaccacattccacaccgttgcatcaccagggccacacacagtgcccagcacactgtatgtgcctcattaaaatagctgaatttatgcattacatttgacagaagaaaatctttctaacagtggttctttccaaggaacacataaaacattataaagaattgcgtagaccttcagaaaggggatcacataaagcattagatggcttttcagttctgttccaaaactgtgagtctaccatgctggttagggtacctgagtttcagtgccccaatatttataacacaaatgtaaattacacatgaaacacacacccctacaaacattgcacaagattttttaagttattatgtccataatttaaagctgaaaagtccagctatctataggttataaatatcacaaatctccactgtgattttaatatttagagaaaaaagtcaaaaagaatgtgaccatctcctaatgaatgcaattactaaaaatatcatcaattagaaatgattttcacatcaacagagcagtcataacagtgtttttgaaactacaggtggcagcctattagttgtcatgagcagaatgttttaatgaaataaaaaatgtaaaacacatttcacattgtacataacgattgcttgattaaactcatcttggtcatgtatcatagatattgaagtatttttaaatgctttattatttgttatgtatttatttattgctcaaacatttacagagtacctcccgtgctaacacttgaaggtaaaattcattttaaaagacatgcaaagtttctttagagctcataattgaatggcaacagcagataattatacaagcaaagaagcatgaaaatagaaaagtaaaagttgtcaagggagatcaaaagtaactcaaggggtaaggaagaaccactttagaaaaagtatggattaagatgatacttaaagaatgagtgagggtgagcttagcgatcagtcaggctggtatattctatacaggagaatagcaagaggcaagaaagaaaatatcacgttaataaactgaaaggaatccaaccaacttagagcatagagtgtgagaaggttaataactggaggtgaggatgggagggtaggcaggggtcagattgtacatggccttatgaaccatatacaacaatttgaaccttaaagcaggacacttggaaacctacaaaggattataaactggttggtaacatgatcaaattttaatctcagcagagtagaaaatataaaaagaaaggagtaagacaggagattaagtgacaaatcaggaggcatctatccaagtgagaggtgccgatgagttggcccagggtggtgagtgaggatgaggaagcatcatttaattggatgttggcaccagagcccatgactcttgcccactaaggttggaataggggaagaggagcccatttgtggtataatgaatctgttcagcccagatatcagttgactttgtagggcttaacagacatctaagtgttatggccatggggcagataaataaaaggcccagacaccagcagagaggtctgccctgtagatactaatatgctcaagcccttaatgaataaatagtaactggacattttcagggttcaaataaccatgagaagacaaaattggccctaactgaaagcttaagcattatgaattttggtcatgttcacttactatctgcaaatgaaacacatagatattaaaacctacctagtcacataaatggagaaaataatacaataccataactatagagaagaaacaacaaagaggtgctttataatgcttcaatatgcaaatgcacatttttaagaaaatactagtgaataatatttattctctacataggacatggtgagcacggcatctacagacttaataaatcatggtttataaatgattttgattccacaaggaacaccgcctctgggaacataacttttcaaaatggtaagaaattcttgagtaaacttcttaattataccatatacactctttgtcaagtaccacagttgtttcaatgctggaaatttcagggcatatgaaaatgacacaagtaaacaaaaaaaatgctttgtttatatttaaaacaaaaaggtcacttatttataattaggtttagcatccccttccctgtcacttacgtgtatatcaggcaggacatttgaaagttacatgaaacctgggcaagttcttcactgtaccagtctctacaagggttttgaaagatgtatcatctctggtccattcttgttaataaagctgatagcccaacacctcaaatgtgacaactaaaagcactacatttctaaaatattccatagggagcgttgaagtgaactaaatatggcctaagaaggactccgtacttctgtagttgagtccttttggaggaactgcaacctagcttaataggtagataagactgaaaacctaatttaggagtatgtgtttgtaacaatagctgagacttggccaattccagtggcgatatttcaaccattcatacactgctgagtgttcaaactgtgttcgaataaggcaaacgccaacctgtaaccaatccagctgctctgtacctcacttccaattcctatatggcatttccctttttttgtctgtaattcttcttccaccatgtggctgtgctgaagtctctgtgaatctgctgtgaatctgctgtgggctgcctgattcacgaatcattggttgctcaattaaactcctttaaatttaattcacctgcagtttttcttttatcaggagaaactccaatgctgatttagaacagaaaatagaagcatggagctttctaaggaaacagagaacaaataaccagaatgataggagggggaaaaaaaaatccctaaatttagtacaactattttttttttttttttttttgagacagagtttcgctctgttgctcaggctagagtgcagtggtgcgatctcagctcagtgcaacctccacttcccggattcaagctattctcctgcctcagcctcctgagtacctggaactacaggtgcccaccatcatgcctggctaatttttgtatttttagtagagacagggtttcaccatgttggccagactggtctcgaactcctgacctcaggtaatccactggcctcagcctcccaaagtgcaactatctcattttttatctgacacctaagcagcgcttaacagcactaaatctggcaacatgttgatcatggagttactacggaggggaatccaaagtcatcttcaaaccaaaaccttccaggaaaataagtttataagttataagttgtcagtatgacgacattgaaaatgtttcccttggcgaagagagtgttagtaggaacacaggactgatttctgggagctgaagaatgataatgcaaacacaagttccagcgatcggccagatgcaagcacaggtttattaacttaatttgatgtttgttttgtaggctgctttgtttcatgccttagatgagaaagacttgaacatgtataaatgaagcaaggcatgagtggacagagagaagttaaatatgcagaagacagttaagtgtttttttacctgacaaagaggaagacggaggaaaccttttcacagtgggatttgctccatgctgcccaagggaaaatctgatttacatgtagatgcaagtaagttcttggttttggcaccaggagactcagaggttgtcttccataggctggcatttctccagtgatgtcagagaggctgggatcaaagggaaccagacaggaagtggaaggatctgaaatataaaaagagagcacgtttgaagtagttgcggtgcggtggataatgggaaaagctgcacagacaaattttatttttaaaatggggggtagatagctatctaaactgataagtagcatttattagaagatttttatacatgttgaatattgaagataagtgttctgaaaaacatacagttccagtaaaggaacataaaataatatttcctgacaactttgagggaaagattggttaatgccacaggaattgctcggattttggagaagaacatggactacaacagagggccattttctgtgtgtaaaacaaaatgctgcttgcttgcttgctttttttctttcttttttttttctttttttgagaccaactcttgctctgtggcccaggctggagtgcaatggtgcaatttcggctcactgcaatctctacctcctgggtttaagtgattcttctgcctcaggctcctgagtagctgggactataggtgtgtgtaacactcccaactaatttttgtatttttagtataggtggagtttcaccatgtttgccaggctggtctcaaaatcctgacctcaaatgatccacccacctcaacctcccaaagtgctgggatgacaagtgtgagccacctctctcggtcacttcttgctttcaaagcaagaacttagcacctgctttaaacctacacactgtatattcagtcaggtaataagtcactaataaggtttagttcttctatttgtacctatcattgtaagttgtttcaagatgccctcaaaaagagaaggaaaatactcagaccactttgcaagaggtcgagttttaggagttcaacacaaagttaaccaaatggactccatcatgtttgcaaaagactttccagtattaataaaatataacatcattataagtaaagattcctactgggatgatatcaggaacacagagaggctacctctttgttttgttgcagaaatgagggaggaaatcaagaggaggaaaggaattatatcccagtgccatctgaagggtgattatttcaaggcttctgaaataattcaagagcttaagtacttcctcctttttggaaacctgagtagttgtagtttaaaccttcattctttccctaatagagatgaggaattagtagctctggaaaattggatttaagaaacatttagatacctatttggtgctgtggggacactaaaatgaaaagccacaaaacagctcaccagcaagctctagagaatgactcatttgtatgtagttgggatacaaaacagggatcacagcataggggctgaaagcccttgactcatatctagaatttaattctggtcttatgatttattaaccgtgtcactaactttgcataagttactcttccaggctttagttctcttttctgtcagtacatgtgagaaactacaaagtgtctataatgatgcttatcacgcatgaaatgagtaacaaatggaaaatggaagctattgttaagtgatgtggaggtcaatttaaactgaaagatgttaaagtatagagaaaaaggcctttattttccccaacgcacacttttatttcaggccagattcaaaatccaaagtcatcttcaaaccaaaaccttccaggaaaataagtttataagttataagttgtcactatgaccacattgaaaatgtttcccttggcgaaggtcatctgtggagagaggctttcattttgggagctacatatattagattttgctatcagaaaattccccacctccaaacatctaaattacatcagctataatctgattactcttgaatttacttcaacagcaccaaaaatcatgttctatctttagggcttatatcactgccatgacaaataccactgaaaataataataattgttcctctgggcttcgcaaccctcttacaacagctgtttttgggttaatgacccaatatgaaacattccattctaaataaacccataaaaatacatttaccacctcagcaaacctttaaaatgcatgggccctgatttaaaacaccaaaataaagagtaaagtttagttttctttaacctctaacttaataaccctgagtatatctggagtatattttacatagcttctaattttatcaagttttatgtaaaacctaagcaacttataacaaatcatcactccttctttgtcgtcctatactcttagttgatgttaagaaaagcacaaaatttgtgggggttgagtcaaattaagatcgtatacaactaatggatctattacatattataaaaattatctttaaagcctcttgctacagacaggaattataaccctcattttattccagagacctaaggtcccagaagcagtgaatgacagagctagaatgtaggtctgattcctttagacttttcacttcccccagtccctctcccagtcaggaaatataagggcccaccagccccagtatttctctgctaggatttttaaaaaaatagatttcattgatttttttaaaaatctatgaaagaacaagatgtctcagaaaaaacaggattcactctacctttgacctaccctccttcaaggctctctcgtccagcgttcatatgctcccacccccagaatgggagaaaacagcagtatctttgaatctgttaataatattcatagctgccattcctgacatatgtggaagccagaatatgtctataataagtatagcaaattgcataataatatatatgtataatatcaattttggaagaaaaagtgtgtgtattatttgtacaagcatagtttaaagtgtagtttctgcagaaaaaataaaatttgcgatgggagaagaccttagttttttactttatgcaattcaagcataagttgtttttataagaaatgcatatcactttcataataaaagaaaaataaccaaaagaagtaatggtgtaaaaatctgtatcgtggctatctttggggggaatgagagattggagtaatatttgagaagggtcatgaggagagcttgtgtgggtaatattgatattttaattttttctttttctttttttcttcagagacagggtctcagcctgacacccaagctggagtgcagtggtgggctcatcactaattgcagcctctatctctggggctcaagccatcctctcacctcagccacccagagtagctaagaccacaggcatgtgccaccacgctcagctaattttattttattttattttttagagacagggtctcaccatattgcccaggctggtctagaactcctaggcccaagagattctgcccccttggccgtccaaaatgccaggattacagacatgagccaccgtgcctggccaatattttaacttttgatctaggtagtggttacttggctcattggttcataatacttttttgattttcacatctttcttttgtatcattttaatcaaactgcttttaaaaagagtcaccaaaatcaattaccaacatgttcaggttaattatacgtttggattttactcctgtttcccagtgtaattgttgataatgctgacttgtgctccctaaagttttctcatttggacaataaattacatggttttctataagtagcctacaagcattgtagtatttttaaagctgaaataaaccttagaggtcaactagggcccagtggtttccaaaatgttgccaagaaagcattctgaaatgtgtggtaaggtttttggttgtcccaatgcctagaaagactatgggtatttagcatagggtagccaatggtgcttatttctctacagtatgatagaactacacaaaggaatgtgatcttagtcttgttttaaagaaaaaaaaaaccctgaaatccaaaatgttaactgaattgcctaagagcacattcttaataaagagtagatcccatgactaaaaccttaggttcttgccttatctaccagccttcttaggcactacgccaaaaccaaaaagctgttgctccatctttcctttcttccttcccttttgtcttcatccttttctcatttgactttcaaactaaaaatgtgggttttttaacctacaaaataaaggcaatacctttcaacttttacttataagtggtagaagattcaatttagcatcagaaagcagggaattgtttattagccagctgcaataagtaatttgggggtaaatcattctgaaatacatattaaagtcataaaattgcatttcttctcacccttctcttctccctccaggttttcctccctcaccatgaagttcagttgcctatcccccagaatacaggatacaacatctgtggtggcttctactgagatttattttctacattttcattaaaatagcaactgaattgactcaataaaatgttgcttatcctaataaagccctttagagccttgcaaatttgcatttaatactctttagtgtcattacagcattaataatctgtgcctaaagagcaataaaaaaaaaaaacctttatactttgtatttaatagaggtagcttcataacccttcattttcatgtgactcggatcttaacgtaccttaaatggaatctctgacttaggctgagtaaatctgagacttcttataatctattggtcctccctgtatttcccagtcatgaaaaataacacagatacattgcaagcaccacagtatgagccttaagcatctccttaagaattaatgatttctgatttactcaaagtcttctcattgctaatggatctgagacaggaagagaataaaaagaaatggaggtggagaagtaagggtaataagtttgcacaaatcatctgcttcttgtggagaaatttttcactgctaacaactgtactgaaggcattgtgcagttagctggaaggcgtgaaaataaactgataaacaggagaccagcaggtatgatctaggggactcacatgtcccaatgtttttatttatttttccttcaagtcattgccaaaaaatcacatccagcaacaatttgtgtcttttttggtatctgaacacaatctgatgggagaatcatttttatttttccattgtgttcgagatccattttgaaaaaaaaaatcaatgagagaaggtgaaagagtattggaaactgagagatccactagtggaaagacacaggctgggcaccccgcattttccaggaagtgcatctgctgtgctacggtaatagttcttttgagccctgtctgggctcaaactactatttaatgttcagagcctcgggtttgctctgagctcaagtatgattataacaattttaaagctcaatgaaaatagagatgaatgaaatgaaaatgaaatgaaaagctgtagaatatcatgcagcacagcagcctaacgcatctggcatagaaacaaaccaagaatgtcttatttttcaaagggagagaaataaaaaaaaaaaactaaaaaaagaagatgaatatatcaaaattgtcatataacaataaaataatatagtttgaaatgcaaaaaaatagtaaggaagagaaggagaaggagatggttagtgaagttcgatgctaaaaaaaaaaatcactgattaaaaggagagaaaaatgttcaaactaagcaagaatgtaagtgaataatgcatttaagaattaaataaaaaagccaagaacttgaagctctcaggctctcactcagataaaagttccctgacagagggaagcagcttctgctctggtgacttcatgcaggggtgaatatatctaaaaaggaacgattcaggcaaaaacaagaaggagagagtttaccaatggaagtacagaaaacatgaaaattcaaaaattgaggaaatggtctaattgtctttaaaataatatatctcagcaaaatgatacaatggaagattaagcctgaatttaatgaccatttaaaaacatggcatcaccaaaccaataacttctatgtcaaaaagtacaagccaatttacaaatggctttaaccaaatcttcatgaaactcctttaaatgcagggtaaatggaaacccttccgactcccactctagagctgtaccaaacccaagcaaggacagtacaaaataaagaatcaggctgggcgcggtggctcaggcctgtaatcccagcagtttggaaggccgaggcaggcagatcacctgaggtcaggagttcaagaccagcctggtcaacatggtgaaaccctgtctctgctaaaaatacaaaaattcgctgagcatggtggcacacacctgtagtaccagctactccagaggctgaagcagcagaattgctgggacctgggaggaggaggttgcagtgagtcgagatcacaccactgcactccagcctgggtgacagagcaagactctctaaataaataaataaataaataaataaataaataaataaataaataaataaatatcaaggcgtaacctcatgtagattagacaaaggcaggggatcttgcaaatcagtaaaaaagtgatgatctataattcagtaaatgtttctgatccttcatataaaccaagataaaattaaagtcccagatctcacatgtgaaaacacatgcagtaaacaaccttttaaaaatcttttcatcagacatgtacaaatgctacatgagtttttcctatccaataagctgttcttgtacattattttcttatattttaaataccatgaaagggcacagaaaatcacaatttaggatgagaaacataagtctgtggcatgatgagagatgcagcgaattgtgtatttttaaaatgcctatacgaaaatctaagacatcaaaattgccattatactggtttttgaagaggtactttctttacccaatctgttaccacttatttaaagaggtaacctttttttaagaaatgctttcagatctgatttataatttaccccttagttaaagaataagctttatttcttgtagagaagaaactagtaagcattcactgagatgaacagcttcgtttagcctccttaattcattttcattcactagatattaggagtataactcagagaaggaaaaaaaattttccattgaaacaaagacatctcagtttggataaatatattatttgtgagcaaagaaagtgaagtttctctattaactacagaataaacatgagtttaaaaaaaaaaaagagcagaaacttggcttttcatttcagttcctgcactagctgtgttgtttgaaatatcaaaacatatttgtatttgtattttgcaaaaacgggaataatatcaacctacttcacagaacccataaagagtatgataataagtaacataacatgaatggaattgtacataaaaagtatgtaaaaacaagaaaatagttgaatatgtatattattacatgtgaacatgaaaagagcttaatgtatacaagcgaccttcatctgcactgaattacctcacttgtgatgaagatgagatgaagataaaggatcatacaaaattcaaaccaaagtgtgaatttttcccaagagtaccaaaatgttactgaatatagtgtgtgtgtgtgtgtgtgtgtgtgtgtgtgtgtccatccaaaaaattttatctcagcagaggcatcccatgaataagagtaggatgtatgtgattagaaaagaaagagtagcaaagtttcctcatcattttggttaacaattgcttatacatttacttttgaatttctcatttgcttaattctgcaggacagatgaaataattgttaatacctttttcctcccaaggaaatctaagtctttcctctatgttattctctaagtaaactaatctgttaacatagagattagttgaaatctaatctcttagattcttaacttgaaaggtacattctagttacccattattttctatgtggttaaaaagtcactgccaaaaagcccagaagatggccataaaataatttttctgcttcaccttaatgataaatttacaaaattaattctgtgactgaaaatgtcttgtattatatttccatgtgagtttttctctcttctctactaatcttcaaccttctgaagactggacattatttaatcatgttagcaagcattcgagtttttaacaaggatctttgcacacagatatgcccaaccaatgtttcttccactacagaaccaaattaaaaacaaggaagatgacagggattatgctttctcattatttttatgttttacataattcagcagtaccgtgttgcaataagagcatagcaatcaatatttcttgaatatataactaagtgcaatctgaaaagtaaatgaatgagcacataagcagctaagaaccacagagagggcctggtgtagtggctcacgcctgtaatcccagcactttgggagaccaagttggacagatcacttgaggtcaggagtttgagaccagcctagccaacatggtaaaacctcgtctgtactaaaatacaaaaattagccaggcatggtgctggcagcctgtactcccagctactcaggaggctgagggaggagaatagcttgaccccaggaggtggaggttgcagtgagccgagagcgtgccacttcactccagcctaggtgacagagtgagattccgtctcaaaaaaaaaaatagaaccacagagagggatgcagcagtaagccccctgcccctgaccccccgtagtagacagccatcaaggtttaggccgtcacctctttctcatttcatttccgatgttataataaccattaagggatttgtgattatttccaagtttggaatctattcttttctcctcaacttagtttttgaagttaatgtcttttttgactcaatcaactcctgaacacttgggaaggacaccatcagacagtttggttatcttgagatacacatttcagaaatgatcctcttagactacccagctgaaacaggcaagactgtgggtaagtcttgaatcaattcttttgccatctattcgatggtctttgtttctaagtgccaaagaaaccttcaagctcattctaatcttcattttgtcagtctagtccatatgacttaaattctactttccttctgctttgaatttcagtgttttcttatatggttctcaaattggctgggccaagatgccctgcctacctttcaatcatttcccttggaaagaccaaacgtaatcttttcaatgtttaattaccagctctgctctcacatcgaatgcattaattacatgggattacagcaatgaagtccatagctctttcctagaacttttcagtgctatgtcccacccctacaattgtaaaagtgtctttaagaatcaagttcaagttcactattgtctctttggttctagtcattagacagtggccacctttgttaaaaacttattccagagttagtttcacagacccagcaactgtctccagcaggcttgacaatcaaggttacagcctttattatggccagatccgccttgtcgctgacaatttgaaagctgatttttgcatcgctgctatttaaagttcaatgaaaaaccttggagggaggaaaatagaattttgacttcactgacattaactgtcctcagaccctcaccctaccctgctatttgggcgttcagtttttctgttctgtttctctttgtacttataactaaaatggtgaattcaaaggttcagaaaaataaaggaaaattctatacgtaatattcgaagatttagtatttctttttcttccaactgactttttaaaatcttttgttcccaaaagcagatatcaccaggttcttttgtgccatgtttagatgaataaaagctttactttataaagactgttcaaacattttaataaaacaaataacagccaagcaaaataccatggcaatgttagcaaagcatttcctgccaaatccaaaaggagatacattgttctaagcattgcatttgtacatactaagaagcactgtactaagttgatatcctttgcaggtatctgctcacttaaagttcagagatttacagtgttcttcaaccaacccacggctgtaggtagaaatcagctctgggcccagttatatgagttcaatgtcccatgcgctgatgtcttttctagaaaactatatttcctagacaggatcagagaaggaaggcaagagcaggaagactacagttttgacttaggtaacataaaggcaaattttgtctcaacctccactccacctaaatttcacctaaataagttggtgcaaattttttattaatgagagtctcggccttttgtcatggcagagaggagcatgtgcttctcttcatgacaattacatgactgctgtctgaaagagggatggtctcataaagaaacttccttcattttcttggccgggtgcagtggctcacacctgtaatcctagcactttgggaggccgaggcgggtggattacctgagatcaggagttcaagaccagcctggccaacatggtgaaactctgtctctactaaaatacaaaaattagccgggcatgatggcagatgcctgtaatcccagctactcggaggctgagatgaaattgcttgaacacaggagacagtggttgcagtgagtggagatcgtaccactgccctccagcctgggcaacaagcaagactctatctcaaaaaaaagaaaaaaaaagaaacaaagaaaagaaacttcattcattttctattgtgtctatctgaatacgacatcagtgtttccacttgagtaaggcattgttagttttggtaaaattggacttttcttggtgggttgtttttcaaatttgaagaattaataccaaataatcctacaccacttaaagaaccaacttatgtgtaaaacttgcagcaaactgattttggcaagcccactgcatgcaccattgatcatgttcaatgtgttacacaagccaaaccttgtgcctgccaagatcatagctgctggtccttgaccagaatttttttttttttttttttttgtgcaacatggttagcagtgtatttgagataatgagaacattcaaatctgcttcctgaagaaatacacattattagtatagactatacaataaaactagaaagctaccaagtgaatctcctcaggggttagattacctatctaataataggttcaatgtggagccttactcttcatttgcatgatttttctgctacttacatgtctttttatagtacacaaacttcacatcaagtttgagaacctaatataattaagcaaagagaacattaaatttttgtattaacctaaatttgcaaatgtaaaaacattgacatcctgagcaggaagtatgtcaattaagtgataatgattctaggattaactgtgacatcaatatttaaaactagtaaactattcttttcataaaatcaagattttatgttcatctacatttgtcctgtgaaccttgttaaaagccatttataattccacaaacaatgtatttatcattttattttgggtggacctcatgagagctacctatatctgtataacaattaaaaacatttacttaaaattctagtttatattacaggttatagtattatctctgtctttttttgtgagtatcaaaagaacatgctcatacaatatactttatgtagaataattttctgtatccctacaagtatttgcctattttaaatatttttgatgtcttggtacagtggctcacacatgtaatctcagcatttcgggaggctgaggccagaggattgcttgaggcctggaattctagctagcttgtgcaatatagtgagacccaaatttttgtctctacaaaaaatttttaaaaattaactgggtatggtggtgcacacctgtagtcccagctactggggaggctgaggcgggggtttggcagggatcacttgagcccaggggtttgaggccacagtgagctatggttgtcccactgcactccaacctgggtgacagagtgagaccctgcctcaaaaaataggtatttgtggctttccttagcatcaatgtctcaaagaaaatgttaggtgtttttttttttgtttgtttaacgttttataccttgttttaaaagtgagagattaagtcaagaataataggactccatccttgtatttccccccacctctctcagagattgattgaagggagttgaaaaaggaaaaagggaacttcagagatgaggaaataatagtgggtatagtcattatggtaatagcaagtgagatacccctccacccaattccagtaattcaataggatatttttttacttttgcaaataagtccttagtcacctgtcctaaaagatggttgaccacaatttctgcataagaggaacagtacttggcttttcccttggcagctcaggccatgggttacacctgtcctacccacccagtgagggggccattggagagcacccagcccaaggacatacaaggttgcaatgggatgaacggtggcccttgcaaaaaaaatatgtccacatcctaacccctggaacctgtgaatgtaatcttatttaggaaaagaaaaatgtatctttacagatataactcagtttgggatcttgagatgagatcatctgagatgatctaggtaagtgttaagtattataatgaatccctagaagagacaaaagagaggaagacacagacacagagaaggtcatgtaaagacagaggcaaagactagagttataaggcaagaaacatccggagtcaccagaagctgaaagaagcaaagaaacattcttcactagaatcttccaagggatataactccaccaaccaccttgattttgcatttctggcctccagaactgtaaaagaataaatttctgttgtcttaagccagaaacaatttaattttgtggtaattctgttacagcaggcctaggacactaatacaaataagcaatcaaaactgccttaaaaaaagagccttcaataaacactcagcttgtcagggaagttggtgactaaattatcccaataagtatgtctctgagagtttgaaaataaaatacagaaaataatgaagatgttcataactggaagaatactaagaataaatataaagagaacaatcagagagaggagctgagtcaggttcctgaagaaacataaatggatgggtaggctgaagacaaatcagccagccagagctcgacacccctccccagctactgtgatgaaaatctttagttggcataattctcatttctaaatgcaacctctgatgagtacagtaacctctggcctttgtaaccaaagtcttcttattaacacaatcattctaaaatagcagtatggggttttgctgtggtcaaagtttatccatggagctaagtgcacttctacatatccagtcataatcagccctgctcatctccctagatcacagctctgatgcttcaaacaagcattttctagactcaaaagcatatgcaaagcggctatttggaaaacccctcagaatttcctacacattcatttgtgccaaggtggctggtccgctctcctagtgagaacaccagtgtgttatctcagcttccatgagagctcattaacagtagctcctacaggttatagaattcaaagagtatcgactagtctaaagtcatgtcgcctcaaaaaatgaaaatttcatcagctttgccaatgaaatgatattttagaagatgatcaagtactatttattcaaccctttagatttttcaagatcatttttatttcaaattgattgattagtagactatactcataactactttactaaattatattttatattttattgtatattgtttatattatacatatattataaattcttatgtctttatgcagttttccaaaaagaaagttagtgaagaagaaaaagttatataaagaatgcctcaagatatattaaaattattgaatattattttccccataaagtcttacataattagtatctaatagaatttagtagcaaaataacttgttcgtttcttaaagaaatgtcatgattacttttaataaataagagaaatttttgtcatgttttctcatcttatcttgattttaagaagcctagagttcaacctaatgcttaattacatgtattattttagtgtgtttcaagaggcctatctgtcatagtggttaagctcaattttggactctgacatagctatacttaaatcctgactctgccaacagacagttacatgacattgggcaaaacatttaatctctctggactccagttttcctatctatgaagtggagataaaaatagcacttacttctgcgcgttcttgtaaagaacaaattagataatgcatataaaacacttagaaactggcttgactctagtatcaacataatacagttatatctgtatttctgctttgatacctttattctaaacaactttttttataaacaggtaaaatacgaatataaacacaagacataggaaaggaatactaaatttaaaaagaacccgaacggcttagagaaacagattaataaatgcaactgctgactttaaaagtctgcactgaatttctgagctttctttttattcctcctttaagatatatttattagtggttagataagttagaacaaaggcagaaaaaaatgtggcatttgggacatcataaagtgatgcttggtcacaaaggtgaaaactggcaatttccccttattggtagagatggaaattaatcttattagtctgtcacaggagtgttattttcaatgtgccccaaagtactggtccaattctttttgctccaacataaatcccatttttagaatgataggatagctactcaaaatgagggaagcactcattcaaaagataaagcaaaattagagagatgtggagaagaatatctaaagaagattcagtcaggcatcaagcctgagtaaatctaaatgatatgttttgaatcaaggattagccaatatacagttgtgcctgaatacttgtggactagaaaaagaaagactttgcaaaatgaaattaggaggcgatcaataaaaatatttgtggcatgagaactgtcttctattctaaaatgcaaacctaaataaaatcatattacaactggaaaaaggtttgggaaacttctaaagcttcatttagagctctgtcattaatttatttaattcaccatagtgtcaagagctacaaatcccaacactatttcttttttttttttttttttttttgagacagaatcttgctctttcacccaggctagagtgcagtggtatgatctcagctcactgcaacgatcacctcccaggttcaagcgattctcctgcctcagcctcctgagtatctgggattacaggtgcccaccaccacacctgtctaatttttgtatttttagtagagacggggtttcaccaacctggccaggctggtctcgaactcctgacctcgtggtccacctgcctcggcctgacttctagctcaataaaaaataaatccagaagccacaggcatatgcagatcttttaattgctaggtaattattcgagtatgagatgtactttcaatcagctctatctgtcaagaactctcttctgttgtcctatcaaaatctttactcaggactcattgcattgattgatgcaaagagattattaacattacttttaagtttacaaatatgaagagtaattattttttagcctacaaagttaagcttatatttcaaaatctccttaacaaagggccacagattctgagttctgtcttcatctaatccagtcagcagtgattttcagaatgtctgagatcccacagatgaaaataaaatgactcatgttctacctggctgcattggtcattgcctttttccatatatcagtcatcataactgagatcagagcagtaagaaatcttgccttaatgttcccccatttgagtcagagtaaaaaatcagggcttccactgaaaatatcaattattcaggtgatgtgttttattgtctattatatattaagttactgttttttttttagagataagatttttccctgatgtcacggcatgccataggtatgtctctgagagtttgaaaatagaatatagaaaataatcaagatgttcataactggaggaatcctgagaataaatatgaagagaagagtcatagagagaagaaacagaaacctggagtgtagtggcaagatcataacttgcatagcttcgaactgttagtctcaaatgatcctctcatcttcgcttccaagtagctgggagtacaggtccatgccgccatcctggctaagttttgtttgtttgttcgtttgtttctagagagatggagtcttgctatgttgcccaggcttgtctcaaacccctgtccttgagcaatccttctacctcagcctcccaaagtgtttggattacacaggcttgagccgccatacctggcctaaattttatgctatgaagagtgactcccccatcgccactcacatggttgagaataaattggtatgacaggaatttcacagatatttgtaataagcaggagtttctctaatcatagaaaaattccctaagtctggtagactgcaaaatgtctccacaaagatgttcatatcataatacccagaatctgtgaatgttacattgcatggcaaaaaggattttacgaatatgactaaattaaggatctggacatgagaagtttatcttgtattaaatggatgtgcccaatataatcgcaagggtccatttaaaagggaggcagtagagttagattcaaaaaaggctaagtgataacagcagagagagaaattagaagatgctaaaccactggctttgaagaccaaaagtgggaccacaagccacggaatgcaggtggcctctaagctaccaagggcaaggaaactaattttccgctagaacttccagaaggaatgcgctctgccaaaaatggggtgtttgctcagcaagaccattttgaacttctgatttctagagtataaatttgtgttgttttcatttgagtttatgaataatgagtttatggcaatttgagttatggcaatttgtcacagcagccataggaaatgaatgcgctaagttatttcaaatttactgtatttttattcatatttgtgtatgtagtccatgcaggtgtaaaaaggtgatacataagcaggggcagaccccaagcagcctccattgggtaaacactgctctttactggttcttcatacctacataacacaatctgcttcagttcaggtaatctctttatagcccaactagagatttcttaaggtaccttagaagttccttcataagaatttcatgaagcaattgggactagttgagaattattcaaacagtgaattttagaagaaatgtttactgggtaaatacagtaacatttaaattatagataagctgattatattttactatccaatttccatgcctttctcactgggcaatttatgaaatcattagttgtgtatggctaagggaaatattgatgtgctctatgagtggagtggcatctgctttattttattacttgcttctgcataatccccagtcctcttgaattttgatcttgaatttggatggatgtcaatccatagataattctgcctgtctgaattttgttcaagattctgaattttaaacctaagttctcttctatgaacaactatatttgtcctgtttttttatcaaccattatttaatttaacaaacatttatagagtgcctgctgtatgccatcctctcttcaatgtacaaaactgtccaaaattcctgcctttcgaagcttaattctagtggatctgagcaaacatgtaaagggataaatattccttcaatgtaagtctagtaaatgtatctactggaatcaccgaccaaaaccaaagaagggctcctttctctttctctgatggaaagagagggggtgtgattggtggaaagtgagggaagggagatgaaaaaagcattacagaggtgatatttcatgactctgttgactggggacacaaaaaatttccacatgaaatactttttcaaaatgtccttacccgttactataaatttcagtgatgatttccttcaatgccctgtaagcaaatgtctctgattttgctactaaacaattaattccatgtccataaatgcattgctccacagtgccatcaccatggatgaggaaaggaaccagtagggctatcacagcttaggtccagtgaactgcaacctgcagcttcttggctaagagtaatgatatgaaaaagtctagctgtagataatacagtgatgtacagctgcaagaaaacaacctgggcttcctaaatgcctttggaaaagacatttcacttctttgggcctctctttaaatatatattgattgagaaatttgcatttgataatctttagatttctttccagtgctaatgttctatgattctattgaaattaaacattcatatatgtaagtctagaatctcttaattctattcctgtatggaatatgtttaataatgtgtgtattgttgcattaattcagtatcttactttctcctctaagacacatggagactaaaatccctttgaaaactactgttctcaaagtactgttaccacacacacatacaggcatacccaattatatttacattctgaaattatacatgtatgtatagactgtatgtggtttaatctcttaagtagtataatatcttagataacattagttaaagagcaacataataattttttcatttgacatagcttaaactttctccatattttgccttacaaattataaaagatgctctcattttttttgtagaatggatcctcaattaagaaccacaaagtaccatattatttcactcaatttatgagagcgaaaacacatacagacacacacacacacacacacacacacacacacataaatgcacatatcaaaggctgattaaaaacaattctggccgggcatggtggttcacgcctgtaatcccagcactttgggaggctgaggcgggtggatcacctgtgttcaggagttcgagagcagcctggccaatatggcaaaaccccccatctctactaaaaatacaaaacttagctgggcgtggtggtacacgcctgtaaccccagctacttgggaggctgaggcaggtgaatcgctttaacctgggaggcagaggttgcagtgagccaaggtcacaccactgcacttcagcctgggcgacagagcaagactctctctcaaaaaacaaagaaaaacgaaacaattccacaaaattttacgagtcagcacacatttaatttcagctcattattctcataaatataccagtgcttgtggtggaaacatacaaggccacagaagatccttaatcatatttttttttttttgagatagagtctcgccctgtcgcccaggtaggagtgcagtggcaccatctcggctcaccgcaacctccgcctcctgggttcaagcgattttcctgcctcagcctcctgagtagctgggattacaggtgcatgccaccacgccaggctaatttttgtatttttagtagagatggggtttcaccatgttggccaggttggtctctaactcctgacctcaggtgatgcacctgcctccgcctgccaaagtactgggattaccggcgtgagccaccacgcctggccaatcataaaatttctaaaaaacaaatatgggtacatactatatctactatgttaaaaaaatgaactgaaatactctagagattttccagataaagtcaaaaccaaaaaagtgttttatgactaatagtccatcataaaactcaagtaagataatattcaaattcctaaacactacgccataaaacttgaaatatacaaaatgtatttaaatgtgtatattaatattaaagtacttacaacttttaaaataaatgaaatatttgttcggatgcataaaacttttggtactaagaggccacaactataaaaacaattctggtcaaatcacccgtggatgtattataaaaccaagggcctcttctctataattgagtgttgtcaagatcaagtcacatttttccaagttcagctgagaatgattttgaataacttttaaaagaccctggtgaagcaccatggaatattctatgagttattcagtctttgggcatgatcatgaatatatttactatctcatttttatgatctcttaaaaagtattttcaaaacatcttgtgggggtctcagaggcaacatttggtgaaaaccatcttccaaactacatttctgtggatttgtgtacagttactctgaaaggaagtgacccttagccattaaaaggagagatttacctgagcaatgccaagtagtatgttggcaccttattttcttttttttcttttttttttttttttttacaattcttcttgtttatttcttcacagttggggcaaaaaaaaaccctcaaaatttaatgcactcaattactacaaaataacaccaaaatggttatgaaaataagtatggaggtgcttatgtctttagtgtggtttttcctttcttctttcttttctcccttccttcttttcctccttcctttattgcttccttctttctccatcatttctgtgtttgtttttttcatgattatacatgtaagcttataaaataaagaagcttttcttctttttatagatgaaaagcaagagaaataggaaagggtaaaacatcctgcaaaaacggcaaaaatgtaattgaactgtcttcaatatatgctgtaataccataaattcctttgtcatggaaaatatttaacatattggcacacataattatggtatatctaccatgtatatttcaataagctatttttcttgaaacactgtcactggacaggccatgacacacagctctttccatagattctctcatgaagataaagaacagttattcctccaggcagaacacggtaaggaagaattttgtgtaacggtaggaaacccagggtaggaggaagtagtttacaatgactcaatgttagtgcaaacaagaaaaacatacttgtttcaaatgagggatattctactaaaatgcatatgctgccagcgtgtgatgattttaatgaattaagattaattctatgcacaagaaatatataaacatactttatcaaacatgacacttcaaacatatgacatagccattttattcaagtttattactcataaacttgaatgtttatatacattgtatttatatatataggatatatataaattatattcttcttatgtcccattcactcttagatatttctatcacaaaatcagctgctagctgcttcttttaacagactaaccctaaaatataaatttcaataacattaaacaagaaatgacaaacataagagagctgccaatagcttgatgataagattgatgtgactccacagaaaaggatgatgctccaagactatatactaaggggctgctacttagcaaaacacccttactagtttccaacagggtgtgtagaagcaacgatcattattttaaagtttctagcaatttttttttgttgcaaaagctgattttgcatcttaaaatttggcagttggaaaaaaaagacaatattttggattagaagccagttctgtcttcttggatagaaatcagaagttgttctggggacagcctcccccttaataccagcagagaccacttgggtaaacacaatgagtcagatggttgtaatagatgtagccgttgttcgtaaagaagtctcaaaccaatgccagataaaaatatcatcaactcttgagattgtctaagccccaggcaacagaatgctcctgtgtgggtagcatgcgtagtgactgaagtaatagatgcttccacaatcactaattcagaaagaggattaaggaagtgggacctgttgcggataggaaagtttcatttatttcctgaactctaaggagtggcaaaatgattgaaagggcccttgaggaaaaataagcatggcagcagcctgctgcggtagagagaaaaagaaggggaaaagaggaactcaaaccaaataagaaaccctatagaggagactgggtgcactcaaaggagtgatgataactgatgaagaggattttactttttttgcttatgttttgagtattttgcattgggtattagtcagggttctccagagaaagtgaatcaataggatatagatagatataagaggagatttattatgggaattggctcagatacaccacactgtttctttttttgtatttataaatagatgatatgggtctcctaacttcctgtagaaccaactaattttgtttactaaaatgatctcaagctggagaaccagggaagcaggttgtgtacttcagtccggtccaaaggcctgagttgcaggagaatcaaggttgtaactctcaatcagagtttgaaagcctaagaactacaagcgctgatgttgaggacaggagaagatggacatccctacaagagaatgtgaattgtcccttcttctgctattttgttctatccaggcctttgataggacagtgcttgtgtatgttggcgagggtagatcttccttattcagtttactgattcagatgctaacctcctctgggaacactctcacagacacattcagaaaaaaatgttttatcagctatgtgggcatcacttggcccagtcaagttgacacataaaattaaccttcacacattgtaatttcatccgtctctttaaggttggtctttgcaattctttatggcactttgaggtgtttttttttttctctttttggacagagtcttactctgtcacccaggctggagtgcagtggcacaatcttggcacactgcaacctcagcctcctaggttcaaacaattctcccggctcagcctcccaagtactggaattacaggcacccatcacgatgcctggctaatttttgaatttttcgtagagacgaggtttcacaatgttggccaggctggtctctaactcctgaccttaagtgattcacctgccttggcttcccaaagtgctgggattacagacgtgagctactgcactcggctacagttttagatttcttagccttttgctttggagaacaatttgaatgtatgattatgttaccagggcgggtagagggtgtgaccctgaatgtagcctaacagtgtgcagagagaagataatgagagggccaaaagcaacagagcgctctgaacagaaatctctagcaagagatgacaagcagccacatagaatggatctgtcaaacatttaaggatcccagtagtatttaaacttaacaaggacagaaccccataaaaagcaagaatttactgccatcaatgggaagatggccgaggttgtgttatgtgttacctacataataacgagaagggtgatctctgaagacatgggaatttgggggcattcaggttcactgcagaatgttgtaaatgttagacagaaagagtgaaatttaggcatttgcccttggagccttcctaccactttctagtatttctcggaaatacaagcaccagagagcaccttttcttgcacggattactttcctgaagaaatgtaaagaccattcacttaatgcctcaattaattttgtttactaagcaacatgctaatctaaaataccatttttcatttgaattagaaagattgtgaatagagaaaaacttttaaagtaaactacaaatgaaagcttttgggtcgtacttgtttttgagtttttttctaccatgttatacttttttatttctttttttccttttctgtaacacagtatcaaggtcaacaaatggcttgatttgaactccctttgaaagttgctggaagctcagaaaatgtcatcaactagagataagaaatttcctttgtcttatacaggactctgtataagactgtattcccttcagtatattttattgttttctttttaaatttcttattttactctgtgatcctgcctggcagtctagcttctgtttccaaatccctgttttcttgacattttcagtggcttgtgattccctgtcaccagcaaggcatataattgaaacgaagagtgtgagaacaataggaacctgataataagtcattgttacaagatcaggttcttatatagcaatgcaacaatataaagaagtatgcttccaggaggtaggtggttatttctattcagactcaaagaatgttaagtcacccaaaagaggaacttatttttaacaaattagaaaaacaaaaaatacaatgaatactttttttagtttatgaatttcctcccctcaattaatcattggttagatgctaaataatacgtaaaaattttcaatatgacttgctaattgagaggacaatcatgatatgtatgtatacattacataatattatattttaatatgcttttgctgaacacttcgaaaatgtttaatgcttaatagcctggccaagttgaaatttgaaagtcatttctgtatcagttatgttctccctctcctctttgtgtgtgcagggtatacattcatgcattactcaacaacaaggatacattccaggtaatgcatctggaggcaacttcctcattgtgcaaacatcatagagtgtacttacacaaacctagagggtatagcctactacacacctatgcttatactacagcctactgctcttagagtacaaatctgtgcagcacggtactgtagtgaatactggagacaattgtaacacaaggtaaatatttttgtattgaaacatctgaacatagaaaatgtacagtaaaagtacgatattataatcttatgagatcaccttctaaatgtggtccttcatcagccaaaatgttatgtggcacatgactgtaataccttttcttacactccaagagaatgccagaagaaactcatttaaaaatctgaatttttaaaagcaatttgaagtcagatttccttttactttaggatgctaacatgttaattctttcaggattagaatagaaactacataattttacatcaatagactctacaccttgttgcttaatattgatttaagaaattcaaagcaaatataaaagaactaaaaaggttagtatgtgtaggcaacagaaagctgatatttgtaacagacatgatttgctatctctgaaaggctttcccccatgtctccctagctggcggaggtgcagtgtaggtaaagtgaccaccttcaaccttctacttggccatgccaagggaggttaccctatcctcagtcgtgataaagctcatcttggcaattgcattgctcttgagaataattaacctactaatagacgtgtgactttttttgctatttaaagaactaaaaccaagcagccctttgattaaaaacataaatttgttgagaataattccttttcctgccccttgaataaggctctgaaggaaagtaaaggctagagctgtggcagccaaattacaaccatggaggaaaaagcctgaggttaaagccaacattctgtggactgctgagcccttggtaatattgctacacagttgaactagtcaaccctgcaattactccgcatgttctataagataagaaattccagctaagccattttagacatttttctgttattttaagtgaaagcatccttatagaaacatatgcctatgtgcttgtatacatagatgagaaaaaattaatgtgaaaagtatgtagtatttatatataaattacatacatattatgtttatttctcatactttcaaagaaataatatctggttaggaattgtattgctctacttcaaattgcatttagagcaatttaccaatgttcaaagcaaaggaagcaaacttttatctacagatacatttgctttctaacttaaggtttcctcaaaaacatgtattttactacaaaaagaaaattagtttggcgtgatggtgtgtgcctgtaatcccagctactcgggaggctgaggcaggagaatcacttgaacccgagaggcagatgctgcagtgagccgagatcgagccactgcactccagtctggttacagagcgagactccattttaaaaaaagaaaggaagaaaataaaccatgtattgtacaaaatatcttttagtgaaatggattattctgcagaccccattgaactttagggagtacagctcagattgtactcagctcaaaagtaaaaatttgactacaccaaagtacctataatctaactcctatataatttgtaatggctttttgtttctgttattgtagtaagtacaacaggtttcaaaattatcctcttctttctggagtatgatcgctatagtttcatgtttctactgaaaaatcaatgcaggaagaaaaatatatctaattcaaaattgtcctaaagacaaaccttaagtgattaatttataatcatatttgctagactcaaatacatattttacggtttaattgcttagcactgtatttttttttcttgccaaaaatgataatagataaaaaatgaagttattttagactgaaatgaacactgcaggttattgatcttttcacatcacattacaatcacatggattgtggaccaaactactgacaatcaagagcaaattcacagtaatttcaggagaaaaaaagttgatggtctatggccataccaccctgaatgcacctgatactgtctgttctcagaagctaagcaaggtcaggcctggttagtacttggatgggagaaaaaaagttgatgtaaatatacaaatagagtcaggatttccaaagaggactcttaggtgtaacatccttggaatttaattccagaagtcattgtaccattgtacctgtagatatggcctgacccaaatgagctcagtcttagtttattttgtgctgctataacagaatatcactgaatattctggatattctgagctgattggataatttataatgaacagaaatttatatctcatggttctggaggctaagtccaaagtgagggattagcatcttgtcagggccttcttgctgcctcatcccatggcagaagggcaaaaaaaaagagtaagaaagaaaaagagatggtgattgaagttgtctttttataagaaactcactcccataaaaatggcaataattcattccagaaatcgagccttcatggcctaatcatctcttaaagttcccacctttaaatgctgttgcattggagattaagtttccaacacatgccatttgggggacacattcaaatgatacctagctttctttggagagccagcccataaactgcagctctgccaatccttgattttgggtagagagctgtgcagttttttcagagactaaatctaaatctcctctaacaaccaggaacgatcatatatatcaggtatgccacgctgtttctttttttttgtatttataaatagatgatatgggtctcctaacttcctataaaaccaactgattttgtttactaaaatgaacttaagtagctttgcttcactagctactgaagttcccagatctcaggtaccacatagccttcagagaccaggtaatggtcataaagaacccagtatttagaatatagatgtatgcaacagtcaaattcctatgtttacctgacaaaatgtgacatatttacttgattaatacttctagagtatatcaaaatcttatcacacagtgttcacttttctgtattatttgttaattcattcactcactcattaaatcaataatatttattggatttctcatgttctgagaaccaagagtatggtaacagacaaaaaaaaaaaaaagatatggtctctaccctcaaagtttagcgtccagtgagaataataataattcacactatgtaaattccactactggtttataacacttacccatttaagttctttatacatgtattcttctttattctttcgaccaatctgtatggtattattaagcatatatcacaaatgaaaaaactgatgcttacaatgcttagataatgtagacggatttgccaagctaacaaattgtagcattaaagcttgagttctagcccactgtaccataaaacgtatgtttttaatcaaaagcaatgactgattattcagtcgtctacgcagcaaatgttaattgagcactggctaagtaccaggcattataatgggagctaggaaaagagtgaagaaaagacaaggttcctggccatttagagccaacattcttatagaaaagacaatacaaaacaagcaaaccagtaaaaaatttagttcaaaatataataacttctgcaaaatccacaaagcagggtgcatgcatagagatggaagggaacagctttcaagaaagtcctctctgagaaaatggcataggagcagagacatggatgattttaaggagcaatctctgcaaagatctggtagaggcacctagaagtccagaagataaaaatatctaaggattaccaacaacaggaattggcaaactctgttctgtgggccaaatctgtcttattgcttgtttttatacactctgtgagtgaagaatggtttttacagcttaaatggttgaaaaaatgtaaacacatattttgtgacatgaaaattataaaaaactcaagttcaatggccataaatgaagttttattggaacacagccacgcttatttgtttgcatattgtctatgactgctgacatgcaacagtggcagaatggagcagctgtggcaaaaaccataatgacaaaaaaatcctaagatacttactgtctatcccttatagaaaacattgcttgacttctaatgaagaggcccagtgagagtgaagatgattgcataaggagagaagaaagggataggagatgaagtgggtgggctacacataggtcagttcaggtggggctttgcaaactatggtaaagtggtttggatttaacaaattgaaagaagagcctgtggaaggttttgaacaggagatttgacttaaattgttaaaagatcttcttgaatgttttgtttcgggctggggtgctggggaaagagtaagagtgagggcagagagagagaagccttggagtattgcattatgaagacaaaatctgatgatatcctaaactagggcagcagcagaggaattgggagaagtgtccatttagaataaacagaatttgctggtggactagaagtgacatagtacagaaagaaagaaagtagtgaggactcccaagtgtctggccttttcagtgggacagtctttagaaatttttaccaagatgaagaagactgcagcattgctgatttgaaaaaagaatcaagaacactgtttgggacataataaatttggcatgcctattaaacctccaccaggtaatgctaattagtctacagaacatgaacatctgaaactcaatgaagaggtcgggaatacaaacatatgtttgggaatcatcactctatagatggaacaaaagacatagggttgagtgggatgacttgaagatgtgctgcgtggataaaagagataagacagcaaagcactgagcacaaaagatgctccaacatttagagttctaatggtcaagagcaaacctgagtggccagtgaagtggaaaggaaaccagcagaatccacccaagagaagaaaacctctcgttcaaagaggcagaaatatcaaatgtggtttggaaaataggtgatagttcttaaacttcaaaacattatcttcttattaattattgtttttttcttcatgtgatctgtttttcctcttcctaagaaggaagactctacaactttaaaaatattatattttattgagtacaaaactattagcaaggccagaaaataacattctaagagttcagaagattcattaattgcatttaaactacctctatccaaacaaaaaaaaaatagagcatgtctatgttccactcaataatcaaatctacttttaattaaatgacattatttagaaaataaggaaaaaataattcaatttgctgtgcaagttcagtatcctacacacgtacccattacatatccaatacttttttattgatactttgccaagaataggaaaaataaagaagcaactacaagaatggcatgaaagccctgtgcaaaactcccactcctatttgcagcctctagaagtcaataacctcagtgtatgtcactatgacttctgaggggtttaggccaaatgttctgctgtcatgtaaggagctgagggacagtaaaacaaataattcataaccccatgaaagttgaaggctttagcaactctgtattttgtagctaagtaaaaaatatatatataagatttctttctcattgcaattttgattgatttttatggaggaaaaacatgttaatttgctgtgctttgcccaatttagttataaaaattcattcaactttcaagattatttaaattactaatcatacttttttacttgcttgtcatgttggcattataactgcattaaatagtatctatagtttataaatatttaatggaggaatgacagccagctttcatagttgctttactatagctaaaatgaagtatgtaatatttgacagtccactaaaaatatttaacagtctactatactaaaaattatttctgaaaaaacacttcccttcaatgtgttttactcagaacctatcaatcataggattatactcccaaaatcagattagtttaaaaatgatcttttgcaaaaccattcattaagaaactacccagaaaaatcaaaggtatattgttattaagtaacattttaaaatgttgcttaaatcaagataaattccatctgggttctttttttctttttctttttttgcccattacaggaaagaagttgtgttggctggagattctctattctgtagagaacagtatttatcattatctagaattatctgtgatcaccaaattgataagtagagtggaactcagcaatccacattgattgaatgattactaagagaaacactctgtactaagtgttgagtaattagagacaaaagctcaatttctgccctgaaagaatttacattccaatagagaaagcaaccaagcaagcatggtcacctaacacagaagggaaggtctcacgacacttcccaaagatgataggtttggagcagagtctccagagtccacaattagatacatttgtctcaatggcttaagtaaacagaaacaaatcttgtttcttgagatcccattaaaataccaggcatacaactaccttgcctggtgttctgcacattagtatcaatccttaaaacagcttttggtttatggatatcaaaggaatcctagagaaataaaaaaattaacatcttgcccaacattacatatttagaatggcaagttaggattcaccccatcaccccacattctcaaggatgtttgctcggcttcaaagctatcctctctcctctaaatcacagtacctcccattgttgatctggtttgtttcaaccaacaaaagctataaagtcagatctaacatagataaaacatttggccacgtgtctaagtgttaagttaggtctctgtcatttttcatctatctgtttgtctttccttaaagtcttctccagttttcttctgaccatcaagaatgctcaaacaccctatgcaggtgaaattataaaactaggagaactgacttcaaaaccaaaaaattaattacaattaatctttaaactagaaatgtctctggttttaattctctgtgattctattaagacaacttattctataatttaccatttcctgatggagttaggtatctttatgtttaggccaatttgtaaattcatgtcatttacgtacacgctcatctcttgggtagaggtaaggcaagtccgtgaccctccagaagatcaccctgggccccaagccagcagggtgttgaggcaaagggcacttgtacctgctccctaaatatcactaaaattcaattgtgaaatttctgtctttaaagttatttgaagagacctttgaaagatgtgactacatgcacttccttcatgttggttatcttgacagtgtcctacactggttcagttacctcatgatatggtttgggtctctgtccccacccaaatctcatgtcaaattgtaatctccagtgttggagattacgcctggtgggaggtgatttgatcatggggtggatttcccctttggtgctgttctcatgatagtgagtgagttatcgggagatctggttgtttaaaaggatgtggcacctctccctttcccacttcctcctgctctggtcatgtgagaagtgccggcttaccctttgccttctgccctgactgtaagtttcctgaggcctccccaaagctgaacagatggccagcatcatgcttcctgtaaagtctgtggaacccaattaaacctcttttctgtataaattacccagcctcaggtagttttttaaagcagtgcgagaatagactaatacacctagtcttccaaatacacctctaggcacagtgcaggtcacagacactcaaatgcctaagaaccttcctacttgaatgagatttaagaaaaagatttcatcttgtctttgcatctttaatgggtaatgcaaagtgtgacacttggtagatactcagtaactgcctatttaatggaaactgataaaataccacaacttttatgatctcattacattgggctatttatggtttagtaagattcagaagaaataatggggcttctggaattctataataatatattgccaacattcccactctcctagaaatttatggttgtgaaccacaattctctagattagggttactgagaaaataaaaagtaataataaaaacttatgctaggtatctgataacttatgccattatcatgatacctataagaggtaatatgatgtcaactatagagaagcataaatggagcacaaggcagttatgtcaacttgctcaaggtcctataatgatgaaatgtgaagttagaatttgaactcaggacgctggtttcagagtccaggcgaagtctgattgggaattttaaaataattctcccaaacatataggagtcaaagataaacagtctcttcctccattgttccagaagggtttttggacaaaccagaactgcagtatgattgttactgtatagttgaataactatttaaaccattgaatattaattcttcattaatcaattattgaggctatagttgaatattatgtcatgtcttttacaatattaatgtgctcttccaggaatctaaatcttatatttcaatttgatatactatgtattttgtatataaaacatatccttaaaacaataaagaggccgaagcacattctcagagtcctgatgcttactgatctacagtctcttataaactacatataaaagattaacagaaaacacaccattcacaaaagacgcctcatggtctctattgcagacaccttcacaatcaattcagctcaatgagaagaggcccatcaatcaatcagccagacagttaatcaaaacacacactgaaaggtctacaagtcaggattctaaaaggaatttaacttcgattatttgaacactaagaatgcctaggttttaagagttgggttgcttccaaatagaggctggagttatccttttttctatgaaataaattgtcccacattattcaaaatggggtcagccaatcaatcaactttctgaaatgcaattctttctaaatggttacagatagccaaggatagaaaagagataacagtgcgataatagtgttcattgagttctttttaatttctgcagaaacatgttacacataaaaaaacaagagctttaaatgactctagaccactaaagaacaattatacatcaaggaagaaatgagatgaggtaaaattgtaccatccaaagttatttcttcccctctcacttaatgcaaatttgagtagcaaaatgtttgctattatgtgaagtctcaaatttccatgtctcttttctaaagcaatcatcaaagcttgaccataagctttacagctgcacacacacacatacatgcacacacacacacacacatatatgcacacacacacacatgcaaaatcctgcaacctcatcacctctcacaagcttgtatgctattataaaaattttttaataagaaacttttgcttacaattagtcaataagactgatggacatttataaagatctgtccaaataggctctcaactccatggcacatcacacctaatagggataatttacattcctaaaatcaactgaataagtgtccctgaactaagaaggatacttaaaaattagaggcaaggattgtataaaaattttaaaaggtaattaatatggaaacaaaatatatccattgctaagcaattcaattccactttttaaaaagtttgaataacaatatttgtagcttaactgcattaacctgtaatgcattacaatctatttcacaaagtaatcttgcaaaactgcctcaagaaacgaccccaaaaagaaatgaagtagaaaaaaaaaagtaaccgaaattttggctgttcaagagtacatcttgtcaccccacactcttcttaaggaagatgagttgagttacattattaaatctatgccacagtttaagttcactctaccaccactgcgttttgtggaaatccaatcacagaacctcaccaaaaaagtattatcaccttttttacatgtttcttttttcctttttttctttttttttcttttttttttttttttgagagagagtcttgctctgtcacccaggctcaagtgcagtggtgcgatcctggctcactgcaacctccgcctcccaggttcaatcaattctcctgcctcagcctcctgagtagctgggactacaggtgcccgccaccatgcctggctaattttcgtatttttagtagagatggggtttcaccatattcgcaagactggtctcgaactcctgaccttgtgattcgcctgccttgacctcccaaagtgctgggattttacatgttcctttataaaaagcacttctatcctgaaaatggtgggtggtacacagtaaaggttaacatgatcctttgctgtttcctcagcctattgttagatctagtgaatttcatgctgctcctggtattctagaggttgagagatcttgtaaactgctactgagaaccccccaaaataaccatgtggataccatgggtgtccttaaacacaagggtcttctcagtatcaatggctgccttttctcactgttaaaggatcaatgaggaataatggctctgctagaaatgaacaagtacagaatgcatcctgaaaacttagaccttctactaaaccttgtccttccccaacttattttggtagacacttccctgcacttactatccaacagagaacactcttgtgcatccaaggtcatggcaccagatagaaaagttgatatgagccttccttctccttgaaactcccagactattattcctccttaattcttgtcaaagttctctagattggttcaggccactgatttgtctataaaccaaatttatgaagggatagcattaggagtccttggcgataatggagccatcctaaaatagatgataaaagaggcaaggtatagggaactctaaaaagagaggcaagaacaaaggttctataacagattctgatttggtttctgtcctaagtatccagcaaacacttatcttgacccattcatccttgattttggctttgctctcattgattttcacttttgtgacctggaacatcttctctgcttactggaaccttctttcacagctaaattctggcttgtatatcctgtggtccttcatgatggactcctttagccaggcatatgggaaagtggcccagctctttctccactttggcttgaaatcagacactccctcttggggctcttttggcaacttagtcccagctggcagctctccagctttcctggcttgctactaaaggtacagactcctgtaagccagtgcctcctttggttttggtgtttcttgttcatcctagagtctcgcttttggtaattccttgaggatttagatcacctctttgactcctttcatgtagcacaatgtttgctaaatgaataacagattagtatctcatccttcacctgtggttttattttcagcccagatgataagcacttggcaaagttaggatgcatcgagatcccagtctttaatttataggcatcttgtagacagaaaataaaggtacaagcattaagaaagcaatagtttttttctttaagtcaagccacatgtggagctgggtccatatactttacagatgaatttttttcttcatccccttttcttttaccatctgattttcttacaacactaattttatgcatggagttgtttgcattctccagagttctagggaccatgacactgtacacagaggagaagaactgactgaatgcctagctgaggcctctgatccatgacatagaggatgaacatctaggatctatggtatcctcaaggccatcactcttacattctatcttctttcctgttacacagaatgaagaatagggtaaaagagaaaaatatgacaaaaattctaataaagtaaacaaagccactgaagaccaagccagtttctttgtctaaaagtaaaagagactaaaacaaccttaccaagaggcctgagctccctaaaaatgaagttgagtttgagccttggggtggagttaatgaaggactggtgagggacctcttgggagaaagcaagaggcaaaatagctttgctctgtcacatccaatgcctcagagagaaaaggagcttgtaattaagcaaggctgcactcagctactccaccgtcagcctggtgcaaataccccacctacaccctccccagacacaattccatgatttgatgccttcacagtggcatgttctggggttacatgggattttctagagccctacctgtcaggaatgagcatatctgtcattgatttcccattctgtcacttacaagctgcctgacttttcgggttacttatcctctccgtacttaagaggccccagtggttaagtggagaaaataatagtaccaacctcataaatgatttaataaatttcaaacacacatatacgtacatgattcaagcatttaaacaggaccatagtacaaagtatttcaatatatattaggtattgttggcttggtgctttcctttttcaaagcatcatgctcatgtcattaatttgattatcatagtcacactgtaaaaagctagtgaagtgagtatccaccacactgaccataagaagaaactgatgctcagggaattaaatgactatcatttcttcaagttagtatcactaccaaatggtgaaaacaagactgagtcccaagtcattttatatttgatccaatgctctcctataaaaccatcttggctgagttaaatgaaacattcatggagttacctaggaagacccctcggtgggattccccaggttaacactcttcattctagggtgttggggtggcaggaagacaagagctacagtttctttaatacctcgttgtggattgtatatattatgatactgatgatgaatattagtaactattattacctatcacatgagaaaaaccaaccacttcccagattgcataatcataagaaataataaacaattattgttttacaccattcagttttaatgtagcatgttatatagcaataaataacagaaacaacccctaatgccttcaatgacctgctctaatcttgtaacattctgggaagaaatcggatgtttatgaaaatgaataaatgagactaatccccacccaggctaatatgagacagaaaatgtaaacatgggcatgtggaggcgaaaggaacatgggtaagtatcactaccttctagaatgcatagagcctgctctggatcatgacaagggtatgtccaagtttatctagatctcagagaagtatctgctctcttgaaggcctaaagtttcccttaaagagttgcttaagaaaaaaataaaactctctaccacttagaaactcatttaactcactaatatgggagagagtatagtgatgtggttgaaagcataatctctggagtccaaagtccaggttctatgcctggcttcattatttacaagctgtgaaatcttggccaaattgcttaaattctctgtgtctataaaaaatggaaatattaatagctcctattccatatgaataataagttaagtcatgcagtatgcttggaagggtgctactgcttagtaatgctcaagaagtgttggctattaatattaatgcagatttcgccgcagccattctaccacctgtctgcttcaccctttagcaacttgactcagccttatagcatcgtaacaacagtcccgctagaacttgaaacttgttaaagacccatgatccttgatattctctactcagcagtgtcatgtatttagcatgtgtttttatctatctcccagcctcctgccttttttgtccttggttttcaaacctactgagataaatacatccatataagcatgtatcctgtcttcctttttttttttttttttttttttgagatagggtcttgctctgttgcccaggctgaagtgcagtgtcatgatctcggctcactgcagcctcatcctcccaggttcaagtgattctcatgcctcagcctcccgagtagctgggactacaagcatgagccaccacgcctagctaagttttgtatttttagtaaagatggatttttaccacgttagccaggctggtcttgaactcccaacctcaagtgatctgcccgccttggcctcccaaagtgttgggattacaggtgtgagccaccatgcctggccccattttgtttcttcccaaattcaaacctccatatgactgcattctattcatcattaaatatattcaccacttttccaagccattctctataattttcctgttcacaatgccctctggaactactgcataataagaaaatgaatagattaacctttatccttcacgtttccttaaatatttcattattttcctactttctgaaatcacacacaagttttatggagttacgaattaagaaggaggaagcatcatacttagaagatttctatcagacaaaacattctcagttgactctttaagagatgtgagtcacactcaacttggatccagattgccagatgggtgggcaggacccgccccggttcccacagagagatacgtgataggacgataggaaaggcttttctcagtaagcaggtatggatgtgctcacccactggtctgcttctcaagagcaaaaataaaatgccactgccatggagcatgtaagaaagttctttttatgttcacatgactaatgtcattcgaaagaggaatgaatgtgtctcgggggctctgcggtggaagcccaaaagtcagtagcagatgtttgcttatttaaatgaaactggacacatcatagtcaaagcccattgctttggcttcctggtcatctgtatcacgtgtggcagccatgttaagtccagactgtctcttgtgttaattacatctcgaatacctagataaatcagaccatacacttttcatcatccggagcaggacccatgttttctgcaaggtagttatgctcattcgtgttcctttgtgaatccacatatccatgttacactttctgcctcatgttagcttgggtgaggattagtctcattcgttcattttcataaagacccagtttcttcccagaatcttgtaagattagaaagtgtcactgaagatattctaagttgtttctgttatctaatgacatatgccatatcacattacaatttagtagcatgaaacaacaatcatttattatttcttatgattatataatatgagaagttatttgtaattttcttatgtgataggtaatctggagttattctcagaatatcagtcactttatacttccctatatccttgaaaattatactggcttactctgagaaatcttggttagctagcagaaacatgctatctgatcaatgataccaataagttacatctaatagaatctttatggaaaatagtcactgaacctagatgctgagaggggaataaatggaaggtaagaggaaaccaattgttattaaaggaatcttcatccaaatggactaaaaactttctcttgcagccagtgtttgtcagtcagcaggaagtagattaggtaaccttttctttgatgaagtgtctcagtgtcttcctgtgcaataatacaaacattaatcaacagtataaataatttttctagctaagaagtctcttcaaacaaagaaataaaatgagaactacaattgacaacaatatttttcttgtccacttttttaaggtagaatatttgcaacagaaataatgctttgtgcaggggtgtttatgttcttaaagttgggccctgctcagattaggaaatgaatcagatttgcatgttattctcagttctacatttggttgactgagagtctgtaaataaaccaatctgtggctttacctagaacagtaaataaacctttcatacgtagtaagaagatgaagttaatgggtgcagcaaaccaacatgacacatgtatacatatgtaacaaacctgcacgttgtgcacatacaccctagaactgaaagtataataaaaaaaaagaagaacaaatacaaatccagaagatcagacactgaaattcataataaaataatgttctccagtagcaatgtggctataattaaaataggaatcataaggcatcgccatcagaaaaatattgctccctagtggtggcctctatttaggttggatggaagtttttaatgcccataaaaggcagatttattgtgcagatgaataatctcagaaattcaaatttgagaaagatattttacctaaactatccatttgtccaacaactaaggattagtaaattatggtatgtccattgtgcaacatgaaattattaaaaacagttgttacaatatactcaagtgttaattgacttgagcaatgtttattctttctttttaagtaaaaacaaaaaacaagatacaaactttatagtaataatggctaactctacgtttaaaaatgatgatttctcttgtctgatctatatgttctaaatctactaaaatgagtagctattatcaatatcatcaaaataaaatctatcaatctaatgtaaaaatttaataatttgtattttgtaaatgcaggatcatgccagcttccaaaccacatcacatctttccttctagaaagggttcctccatcttttaatgtggagattgcaatttatgtaactctgaacatgctgggtcactgcagaagggtgcccagctcaggagcacattgtagcagaaatttaatgtgtgctctgcttaaaaaaactgtgcaactgcagaggggcatctactcaaaaaaaagcatgggagataaaagaatgctctttaaaatttccattaagaagcatcatgtgctaacagcagtcttaacaaataaattttctatgtggagtggtatttttatttctgagcaatttatatagaacaacttctgtaatacagaagcccttttggggagtagaatttctaattcaggggtgatggggattacagatgaaagtgaatatccatggtgattttcaagtcatttggcctctggctctggtgctaggtttatgactaaaggtagaaaattgagaagaaaatgtatttttgagttatttgccaactacccagtcaagactaacctatgtgtttaacaggcagaaccacagtctatgagataggtggaggaagccccaaaatgaagagaataggagtggaagactatcagcaaaagtctagaagaaataagggcaccaaaaatcatacaagtatgcaaagccttagaaagtattttaaacactgtgtttgcatcaaaatgatccactttggaaataaagaataaatgtctttaaaaattctacctacagtgttcaaaatgtttcttaatgttggctagcttaacatacagaaattcatacattcgatggcacagtttaaacatttacattttccagacaatgtctgcaaatactcaataagaacatagcatttattagattggatataaaatgtgaaggaaaagttttagggatgaataaggtcaaactagttttttttcttcctataattcttcatctaagtttggggaaatgtgaatttgaaattcatataattcagttgtaaaatatttacatttgttctccaacacaaaaaaatggagacactgccaatagttggctctttaaacatattttctgaaaggaagtgtttatttaaaataatgtttaacattatgtacagaatgtgagaaaacaataaaaccctgccccactcacagggatgggtttgatgaaaattttgagaattatgtcaaaacatcctcgtgtgtaaactcttgccattctggttttttaagtcatttctatacttattgcaagaatcctttcttaatattttcaaccacagtctgatcgaaattctaaggatggcaagccagtaccaacatgtttactttcaatttgtctattttgtacagtttcttttcagaacttttagttattataggcacaacacaaaatgttagatgccactcaataatgcattgtacactttgcttactaaagtaccatttttaaatatgtataaataaaaaattgattatagagtgttttacttatcatctggaattccatatccgtcttcagtgaataacatttcactatctactaactataacattctagcattcgacaataatattcaacaggcaaaatctagttcacatttttcttttgcataaaactcctacagtttttatttcatttgactttaaattatataaaaagtgaaagtattgcaacgaggtttaacaagttaatggtacatgaatgcactctctcctttattaggcaaatttgcaaagtggtggagcatttggcactctcttctggatagcaggatagcacttgacattttatatgcagatgaagtaacagctttaatgaacttttgcctaacctatgccttcatacacgaaataagtagtaaaattttttcaattgctgaactaatctgtgcatagggaaaaaagccaatttacaacttactacgtaatacagaattccatttctagtcttgttactcagtgtattcctactgaaaaagatgactactctcaagatgactacagtcaagtaaaaaaaaatttcattttgatttcaaattaaaatgtataatgtattccattaattattcatatgaaaagtgactttgtgattcctgagcaaacaaatgaatacagtttttctttcacaattaacggataacactttctaatcttgcaattcttcccattcatctgcattaattctggttgtgtcaaaagataagaatcattttttgatctttaaaaagttgaaatatttcaaaaaaagttattattattgtaaaatcatttggtttttatctgagtttactctttcttctggtttatcaatcaagatacagaatcatcccataaccaggggtcaaattgtagttatacttctaagttgccatgaggcacataaccaatattttctgcatgtttgtactcaattagactttaaaattaacctaagttgattcaagcaccttgaatgtataataaaatagtatatgtagtggtaatagaaaacagaaagtttctcttttcacatacacagacacacacacacacacacacacacacacacaaaggttgaaggaaaaaggaaggcagagagggaagcaggaattagactctttcaatgtgacctgtggtaataaagttctatttagggcctcagtttctctaacttcattcagtgccctaacacacatccccagttttttggtttatctgtttggttttattcatgcctcacatcacttttccttctaccctccatcaatgcagtatttccatacatcccaagtgactatatttattattattcctattccttagcctactccccctgttcttgcctaataactcttccagatgataaaagcgtggaaggcttccatgtaccactttgaatttttgacatttttatcaaactctatcaccatttaatgagaaaaagagggaacaggtcaaaagtgaaaaccaattttgtaagttcaggaaagtcaatgggaggaatgtaaattttgttttcaaacccaaagaaagtattattttcttaaagatcaagctaacacatgaaatgtgaaaggcagccatcacaataatttacttctaaagtgatggtgttgttaatatttgttgcataatatgtgttccataagaatggttactattgacttgattttcctcaccattaatattgatacaattcagaagttcccactaaatagcaacagttaattaagatgagaagacaatatgattgcttcaaactactacatattatatgagtttacatattttttcaaaaagccaaaaaatttaaacaaacaaaatttactttttctaatttaaagtattatctgactctaaacttccctaacactgaaatgattccttcactttcagtctatatacatattcacaggtgaggtgagtctcttgtaggcagcatatagctcagccactctatgtctttcaattggagaatttagttcatttacatttaatgttactattggtagttagaaacataccactgatattttcttgttttctaggtgtttcataactcctctcttctttccctcctttcttactgtttttatttttttgtagtccagtgactttttttccggtagtatgttttaatacactgctttttatttttaatattttctattgtctgtttttactttttggctaccatgagacttacaagaaacgttccctaggtataaaaagttatttaaaactgataccaacttaaccttgattgcaaaacactaagaagaaacaaaaaagtcaacaaaaaaggattgtacacattaaatatccccacatttagaatttttaatgtcataacttacatttttatagtgcctatcttttaacaaatttggggagttattatttctaatagttttgtcttttagtcttcttagtaaggatatacatggtttacatgccacaatcacagtattagtgtaacaaacacattagcattttttttttttcagtttgaaaaacttccattaacatttcctatgcaacaggtctgtagcaataaactctctcagcttttgtttggggaaacatctctccttaacttctaaaggataactttgctgattatagtattcttgattgaagtttttttgtttgttttgtttttcttcagcactctgaatgtatcattccactctctcctggcctgtaagatttctgctgagaagtctgctgtcatacaattgggtctctcttatacattatttgcttcttttctattgctttttttagaattctctctttgtctttgaccttttagagtttgattgtatgtcttggggtattcttattcataataaagctcattggtaaattttgaccttcctgaacctggacacttatgttttattctaggtttaggacattttctactatttctttgaatacgttttctattcctttcaaaaaattctttctttaatttcaatagaccaaatatttgcttttttgaagttgtcccatagatcctttcaggtttcttcattaccttttattcttttttttttcattttttctcctctgcctgtactttaaaatagtctgtctttgaactcattgattctatttgatcaattctgctcttaatgctatgtattgcattttcatttcatcctttgtatttttcagtgctagtatttgtctcgtgttttcaaatcatttcaatgtctgtattacatttctgtgataaatttctgaattgattatctgtgttttcttaaagttcactgggcttccttaaaacagctattttgaattctgtgtctgagagatcccacaccttcatcattttagggttggtctctggcacataattttttctgtttgatgacatgaaatttccctgaatgttcttggtgcttgggaacatgtgataatgtctgtgcactcagggactgagtatttattttagtctttgccatctgcccttgtttgtgcctgtccttcttcagaggcccaggccttccagggattctaagcagattgttgtgttccctgaccctgtgaccactgcagctgtgtcagcagtaaaagactctctaagactaggcttgtcatcaatctcatgaagactccaaggttgatgcagctttctggccaagtggaccttgggaagacccaaggagggttctggggctgtgtgggaacactggccaggcacctgggtctagaaaactatcccagtggctcagatgggcatatctccagtcaggtctctgcacagatggaattgatcctcaactgcagcatagaagttggagttgagactgtgctctcttgggatctgctatgggaaagaggctagtgaactcaccttcttggctcaatggttatgaatcacctagcaggcccctgccaagtgaggtagttcctcaattgcaacaggagaggctggagctgaaactaggtccccttgggatctgctgtgggacagaggttggtaagcctgcagagaggctcagactcttgggctgcaatatatgagtgggtctccctctaagtccctgtgtgagcttctctgagctgggacctcagctggggttggggactcctgtagctgagccacagggcaactcttaggttcactgccaagtccactgtcagtggacagacaaacctttccaccaagaccctagtgcatatgattccttttggaccccttggcagatgattttgattgcatgctcaaggccaaatggggctgtacccaagccccttagaggactgagctatttccaagtttgatgtttttaaatcacttcaatcattttattttgaccttcctgtacctggatacttatgttttactctaggtttattatttttttgaatatattttctactcttttctaagtttcttccttaatttcagtagtccaagcatttgctcttttgaagctgtcccatagatcctgtaagttttctttattccattctatccttttcaacaatagaaattcctttctattcttttcaaatcaggagcaagcttggtgaatcagccacctgtgtgtcagtctgcactctcaaaatgatgctccaatgtcttgggctccactggggtttcacaaacttctacctgaatcttgagtttcttgcagatagacttttgactctgaaggtgtgcagaactcttgttgtatgaggatatgagtaggttccttccattgtgcctttttttatgctctgtgttcttataagttgtgtgctaatatacattcatgccagtattctgttttcagacatggtgagaaaaatcagaaagaaagaaaccagcatgacacagtttcttatttgagcatctaaaagagtttggtgctccagacaggtagaaacatagacccgcatttccataatagtagaagtatttgtgttatttggaaatagactgagttgaatgcttagacacatctataacttagccctttagccattcagcagtgactctagttaaggataattttcaagccagttatctattttgcacactttctcatttttatattggcaactacttagccatatactatttactatttctttttttttttttttttttttctgagacaaagtctcactctgctgcccaggctggagtgcagtggcatgatcttggctcactgcaacctctgcctcccaggttcaagcaattcttgtgcctcaacctcccgagtagctggaattacaggcatgggccaccatgcccggctaattttttgtatttttagtagagatggggttttgctatgttggccaggctagtctcgaagtcctggtcttaagtaatctgcccaccttggactcccaaagtgctgagattacaggcatgagccaccatgcctggccactgttcactatttgtttattactcactttattacttggttatgttcctgaactataagagttagaagaaggaactccctacttggacatgcctctgaatgcaaatagctatcttctctcagctactatactcattagaagatgcaaacaacaatttaacattttttcaacagcacaaacttaatttaccttgaaaagaaatactgaagcgtaagatcaaattgaatcattttaggaacaccattagtatatgcctgaaagtccctgtgttcactctgctgctttatttagatgctctgttgagagcattaaaatatgaaagaaaaagatatggttaagaaatatgggaaattaaatatcgttaactcatttactatgtgaagtaaactttacagatggctatatagatcagtactgatatatatatatacacatatatttgtgtatgtgtgtatatatatgtatatctacggatatatggagagagagacatgcaaatacacatatagttaatttcactttttctccatggatcactatagtatataaaaatagataaagatttttttaagtaactgaaaatgtcaaaactgaaatgtaaacttctctagattaaaaataataatataaacatatacgtatataaaaatgtactgtatgcattacatgtacagtatatatgcatatatatagcatacatatacaaatagtactatacctatatgcatacatatgtacactcacaaatatattcattctgttatgtatctagcagtctaggaaaaagtttgttagtaaatcaattaaaacttggcttagctctctggtccattatttcttttagatcaaatggctattccagctaaacagaaaatgctccaagctaagcggctcttggtgcctgcccacatgaatccaaccatcttctccacctacgtatatcttgtctaaatatgatttcatcttatgggaagtatgctctgatttaaaatgttttcatgacacacaaattgaaggtcatttactttcattaactcattgttaatagttttccgaggtgtaattgacatgccttacaattcacccatttaaaattaattcactcatttaaagtaaatggtttttagtgtattcagatagttgtacaaccatcaccatagtcaatttgttctctatttccccagcttcccccctacccacctgctgatagccctaggcaagcagtaatctttgtgtcattctataaatttgtctataatggatatttcatataaattgaatcatacactatgtgatattttgtgatttttttcacttagcataatgttttgaaggtccatcatgtgtcattagtttatttctatttattgccaaataatatttcactatttgaatgcacatttagtttatgaatttattataaacatttggggtgtttccactttggggctattatgaataatgctgctatagacattcatgtataagatattcacgtgcatatgtttttacttcttttcatatatatatatgaaattccaaactgctatataagaggctgcacaatttcacattcctaccagtagtgcatgacagttgtgacttcttcacacatgttatctatctttttgactatggccatcctatttgatgtgaagtattattttattgggtttttgatttgcatttccctgtctaaagatgttgagcatctttttatgtgtttgttagccattgtatatcttctttaacaaagtatatgttcagatattttgtgcagctttaaattgggttatttctttttattgttgttttcattacaagagtttattgtaagagttgtttacataatatattctagacccaaatttcctatctaatatatggcttacaaatattttctcttatcctgtggcttatgtttttactttcttgatagtatcctttaaagcacaaaaattttgaattgattttttcttttgttgtttgtgcttttgatgtcatagccaggaaaccattgcctatttcaaaatcatgaagatttattcatgttcatctaagaattttatagttttaactcttttatttagatctttgatacatttttatttaatttttatatatgtttccaaaacatgggtccagcttaattcttttgcatgtggatctgtacttgtgccaggaggatccgttgaaaagactgttctttccccatagagtagtcttgtcatcactgccacacagcagttggccagaagtgtgaaggtttgcttctggactctcaattctattccattaatctgtgtgtctatacttatgtaatatcatgctaccttgattactgtacctttgtaataagttttaaagtctgaaaccacgagtccttaaattttttctttttgtttcaagatagtttgggctattcaaggtcccttaaatttccatatagattttaggataagcttattattttttacaaagccagttatgatttttgatgagaattaccttcactctgtagatcaatttgggaatattgacagcttcacaatattaaatctcctaatccatgaacacaggatgtttttctacttatttagatctttatttctattatgctatgtagttttcagagtacaagttttgcatttcttttgttaaattcatatatgtgctctaatctttttgaaaaattgtaaattgttttcctaatttcatttttaggaggttcgttgcaattgtgcagaaatacaattatttttgtaattgatctcttataatgcaaacttactgcaaacttactgaactccttcattagttttaatttgttttttagtgaattcctttcaattttctatctacaagatcatgtcatctgcaaatggagatagttttacttcttcctatccaatttgggctgcctttccttttcacattttatttcctgattgtcctacctagaacttccaacatggggttgagtaaaagtgattaggtgaacatatctgttttgttctggatcttaggggaagatattcagtcttccataatgatgtataatattatttgtgggatttttgtggatgccctttggcaggttgaggaagttcattaattcttaataaaggtaaatatattatgaaggacaagagtccagctggtaactctccagttgaaataacagaataagggaaccaatatatttcaaacctaacacaattgagatttttcacatatgtgaaatcttacactgtgtttgaagtgtctcgttatccttacttaacaaacaagccaaatctcagaaattttgtgtaactttcccaaaatcataaacactgtaacaacagcagtatttgaccccaagcctcttggatttcaagaaaaacataaaccagtttgaaattgtgatattagacttgactaaaatgctttcaatgaaaacaaaatgagatgattctttctactgaaccgaataacttaaagataatttgttccttttgctattgttctctcaagagacctgaaatttttccactaaaccacaacttctttaagatatagcttttacttttactactgttacaatataaatattcatttttttcaatctgctgcttcagttctttctgctccaaatgtgcaatgatatacatttgtgggtgaaatgaagaaaaatatatatatttactacaaaaacaagttggctttcaatggtgtgtcctttaaccggttttatcttttctagttcaaagccagagttaatcttagcattatggcaatttctgggaattgttaaaacacacgtatacatatgcacacccacgcacacatctttttatttgacaatggtcttgtattcagacacaatactttcagacagaagatagtgctgcaaatcatttgggaaagaaacacgtttttttctattaaaagaatgattttaagtaacatatttatattcatgttattatgtgtatctctaaataaagtgttagcatgtagtttgaggccagagcacataaatcagaggtcatcagcctggtaaggcaaatagaattttatcaaaatggtatttgaggaagcaaatatttagaattcagtactgtctaaaggtggagaatattatcctaaggaaaaattgcaaacagaaggaagaaaaggcagtctttgtgggcttctttttagctgtcaactttttatgttgccagacaaaaatcacatggagatttcgatctaacatattcgctctatatttggcagagtcccttgtcacaagcttcctggagagaactctgatatgataagcctccctcactactatttttaatatatatatatatatatatatatatatatatgtgtgtgtgtgtgtgtgtgtgtgtgtgtgtgtgtgtattatatttcactatgactagctatcgctgcagtaaatgggagttgagcatcccaatatctgattagactacaaatgtatctcaaaatttattttttatactttcaatgctattaaataagttgcagaacacctaattcacttagaacatacatttcaggaaacaataaattttgatttatgttcctgaaataacattttattcctacgtcttaaatcaagtattgagtttctttcctacatttgccctgcactgaaaattcattaaattctcatagaactacccccacagtcttccatggtgattcaaagtgactctagcaaaagcctcagatgtatgcactcttttaaccaatattaaggacatattcaagaaacctcatctctatgaaaaatacaaaatcctggacatggtggttcatgcctgtagtcccagctacttgggaagctgaggtgggaggatggcttgagcccaggaggttgaggctgcagtgagctgtgagcatgaccctgtgtcaaaaaaaaaaaaattaatcaacttttagttgattcgtatctagaaattatgaacatttaccttttccttacttttctgaatttaatgctaccagaaatgttttgtaagaaaaacataaattcatcatcacagcaagggtagcacagggcatcacttggaatataaccccaagtattgggaattttctcctagatatgagaaaaaatttcatcactgagtgcaaagctccttgatgaacagggctcatctcagtgttattgacctgtatctcttacggagtcagatatataccgaacaacaacaaaaatgtttgttaattgagctgaagtagctcagggttactttttcttttagatcttatgtttctctctgctgaaaaataatatgtagagtgccaaaacatggatagaaagtggtgtataggctgtcctcagacagttgtgctaaacaaacatttctgtttttcaggaacacagtttaaatactaccctataaaaacttattctgaaaatgcaataatgagagaaatggagaagctaaatttgaaaacatgcagaggatttatcattccaacaatttgtagtctacaattttacttatctaccaacacaagtcctttacctaaaggaaaaaggtaagtgaagaatgtttgatacaatgttgttttttgcatagagtgagcactaaacaatatctagcacaataacaaatatcagggtaaaagggaaaatggaaatggtcattaatcaaagaaagaacggaatagcttttaaaaaaggttgttgagattgaaggatggtctcttcaataaatgatgttgggaaaactagatatctacatgcagaagaaataacactagactcttatctcaccccgcataaaaaatcagctgaaaacaggttataaagacttaaacataagacctgaaactgtaaaaccactagaagaaaacataagggaaaaacctcttgacagtagtcttggctaagattttttaatatgacccaaaagcacaggcaacaaaaggagaaatagacaaatgaaattacatcaaactaaaaagcttcaacacagcaaagaaaacaatctacaaagtgagagacaacctatggaatgagaaaaaatatatataaatgatatatctaatatgaggctaatatccaaactatatagagatctcaatttatcagcaataaaacaacctgattaaaaaaatgggtaatagacatatctcagtagaagacatacggaagaccaacaggcatatataaagatgttcagcatcactatcagggaaatgcaaaataaaactacaatgaaatactacctcgcacctctaagaatggcttttatcaaatagacaagataacaagtgctggagaggactggagaaaaagaaacccctcaacactcttggtaggaatgtaaattagtataaccattacaaaaagcactatagaggttctccaaaaaattaaaaatagaactaccataagatccagcaatttcctttctgagtacacattcaaatgaattgaaatcagtatctagaagagatacctgtgctcccatgtttattgtagcattatttacaatagtcagaacatggatcaaagtgtctatcaacagatgaatgaattttaaaatgtggtatatacaaatatcaaaatgtctaggctaagacatattcatatacataatgaaacactattcagccttaagaaaagaaggaaattgtgccattttcagtaaaatggatggacttggaggacattgtggttcataaaataagccagaggcagaaagacaaatattacatgatctctttcatatgtggaatcattaaaaaatagatcttatagaagcagagaatagcatggtggttatcagaagctaggggagagtggcatgagtaatgaaatgggagacattggttagacagtacaaagtttcatttagacaggaggaataagttcaagagatctattgtacatcatgctgactgcagttaataacaatatatcgtatacttggaaattgctaagagagtagaatttaaatgttttcatcacataaaaaagatatgaggtgatggatatgttaattagaccaacttaatcattttaccatgtatacatgcatcaaaacatcatgttgtataccatagataaatgcaatttttcatttgtcaatttaaatagttaaaaataatataatagatagattgttctttcaaagcattcaacacttctagaagtcaacttggaaatattagcaaagtttttaaagtatccttaatactaccacataacaccactgataggaatttaccctaaaaatacaatcagtttcacccaaagatctcttcttcctaatagcagaaaatcaaaagcatcatgaatgctcagcaataggagattatttctgtattatcatattatcattgaaaccattatttaaaatgtacactcatatgtaaaatgataagcaacctattgatatatctatattcatgtaataagaaaggcaaaacaatagtgttaatagtgatttgcactaaaatcacttgggaattattataaagaaaattatgagaagttcataaattatttctataatcagaaatgtatgaaaaaaatcagttatcttcagtacaaaccaaattgcatatgaaatataccatctgaaaatatatataatattttataattgaaattgtgctccatgagagctggattttcattttatttatatttgctttctaagtacctgagccagtgctcaactcatagaagatgttaaattaacgtcatatgggttaacatattctattgatcaatcaggaaaaaaatgaactctcagttttcctctcctgaaattctgcgttaagtttagtttacttcttacaaagtaaatcaccatatcataaaacacccttcttctctagtggggaaaaaaatgaaatactatgggactccaatttttacttatttaaattttatccttccaaaatataaaagaaatgcacctcatcttggcctaattcaatttcaaaaatgatatctagtgaaaagagtacatctcagtcgagtatgaacgaaacccttttgactatactgaaatcaggtacaggtttgtctcttcacttgcccttactaaaaataactattctagtctgttcatatttgtataaccttagatagtaatttgaaaaatctaacccatggccatctatctttaaatatgaaagtaataaattcttcttaagccaacatcatgtaatgaaataaccttttaaaagcaatacataaacaaactcacacagattttttctgactggtttagaaaaaagaaaaaaaaacagaactcacccttatcgttcaaatgaaacaacataagcagtataatattattataataccaagtatacattcagtaaaattaatttatattttaaggatttctactcagtcagtattttttacaataatattttgttcattgtaacacattttctaaagcatgagactgctaaatttatgcattaggtctatgatttcaaatgctgtctccaagaacaatagaaaacataaatagaattcatgtggaaaaggtaagctaatggaagttgacctacgtatttctgaattatttcactagctgctcttcatacagtatctgacatcattgtgaaaacaatctctctcagctgtaggcacaacatgatgtctccagaaataccatttaaaccaagaagtttcatgtaataacaaaagcacaaaatgctccaagttattccagaaaacttagatgttgatgtcttcatcaagagaaaagcataagaaaaaaacagatcttaaaccagaaactagtttagtcactacagtgcagaatagagcatttttggtgtctataaattttatatttcccacagggatttccaagataaaagaatgagaatcacaattctttgaagaagaggaatgacccatttcaaaattctctattccttggcaaagttcaataacacagaagaaaaaaaataagaaatggagcccagttaccattgtgtgactacagcattcatctcttatctctgctgaactcctattctcatttcatgtcctcttaaaaacaagaattagactcttaccaactctatcacaggatctgaaaactaaagacctatagaatctacaactttatatttttgttaagaaaaaagaaatactctgtcacaactatattctccagaggactgaagctgttaaagtccaaggagttattattattgtactctattccacaacttctaaaattcatgatttctttatttattaatttaataagtatctataaagtgcctgcaatatgctgaaatctgccctacactagaaatacagtagttaaaaaatacagagtaaaatacaccaaaaataataatcatcaccataagtaaattacataatatgttaaaagtaggtaagtgtgcctttttttaagtacaaaaacaagtccaagggaggggttagaattttaaaaaggaattactatggtaatgttccccaataacaggacaattggacaagaaaagaggagatgaaataagccatgtagctatctgatggaaaagcattctaggcagaggaaacaactaatgtaaagtctagaaggtggggacatgctggcaggtgagcaagtgagagagtacagagagatgaagctgggaagataaaagagcacagatcatataggactttgtagacctttcatcaggatgaggacgtttctttccattccttgtaggctgagagattttatcatgaatgaatgttgagttttatataatactttttctacatctatagggatgaacatgttttattttctttttaagactgctgatatggtatattaaaggcattgattttgatgaggaaactatcttgcattcctggcataagccctatttggcaaggatacatattttaaaatacatttctggattcaatatgtttacatttcttaagaaatttttatctacatttatgaaggataatgactgtaattttcatttcttctatctttgttttttaaaaaagtcagagtgataccagtctcggaaaaagagttttaaagtgttcctgtctcaaacatcattcaacccatcaattccattaatgagcatatacccaaaggaatatacattgttctattataaagatacatgcatgcatatattcattgcagcactggtcacaatagcaaagacatgaaatccacctaagtgcccatcaatgatagactggataaagaaaatgtggcacatatacacgaagaaatactatgcatccataaaaaggaatgagatcatgtcctttgcagggacatgaatggagtggaggccattatccttagcaaactaatcaggaacaggaaaccaaatactgcatgttctctcttataagagctaaatgatgaaaacacatggacacatagaggggaataaggcacactggggcctattggagggtggagagtgggaggaggaagaggatcaggaaaaaaataatcaatggatactagccttaatacctgagtgatgaaataatctgtacaacaaacccccatgaaacatgtttacctatgtaacaaatctacacctcatgcccatatacccctaaacttaaaataagagttaaaaaaaaacaagtatttctgcctcttctattcttttgaagcatttgtgtagaatttgtgtggaattacgtagaattttaaggtgttaagcttgtggtaacctgttacacagcaataaaaaaactaatatattttgtatgctttcaatttattgtaattttgaaaattaagattcagtacattgtcaactttaatgtttcatgtgcattgaaaatcatgtgagtgtagtaatcgttgcatagattgttctataaatatcaattgtatgaagttggatgatagtgttgttcaagtcttctatattcttcctgatatttttatctatttgtcctattaatcattgataaaagagttttgaagttgccaactacctagtgataaatttttctcgttctgtatcagtctggtcaggctgccataacaaaataccatagactaagtgaattaaacaacagagacatattttctcaaaagttcagatgactagaagtccaggatcaaggtgccagcatggttagtttctgatgaagtcttctatctcagattaaagacagtcactttttcactgtgtcctcacactgcttttcctcagtgcacgtgtgcagagagagtgaaagagaaagctctctgtgtctcttcttaaaaggaaacgaatcatatcagatcaggatcctgttctgacctcaaccttacttccatagaggcctcatttcctagcacagccacactgagagttaatgtttcaaaatataaaattttgggagacaaattcagtctataacaagagctcctttcagttctataaatgttactttatttattttgaagctttattactgagaccttaaaattttagagttgtagagcacagtaacctcagcaagatggtgaactaggaagctccaggctctcattttctcacagggataccaagttagcaaataaatacagagaataacaactttgcaaaaactctagagagaccagttaagaagttgttagacccagttcaatgtataaccaagaaaggattcccgtgaaagaggcaggaaaatgtgcagcatttcgcaaaaccatatatgccctacctttcttcagcctaacacactccaatctagaggaaaccttccacaccagggattctccctttgaacagaaataaaagagtgggccattgttctgactagtctggggctccccaaagaactggtatctgtctcacctgactcagaacaatgataaggctgtagatctttttggaagtctatgaaaacaggcacaatgaaggcagcatgttagagatataattccacaggaagatgccaggtaaaacaaaagagaaaaagcaggaacaagctgattaggaaatttgtgatgactaaaagtatatacacaagcccaaataagatactccaaagatgtttgataggttctagatctctagatatactgctcaatgaaagtgtccccctgaacaaagccagtctgcaaagactgggtgagatgattttttttaaatgtcaagtctcagcaacaacaaaaatgacaagacatgcacagaagcaagaaaatataacacaatcaaagaaaaaaaagccacagaaatcagtcctagagaaaactgatctatgagctgcctgacaataattataaaataactatcataaaaatgcccagtgagatataagaaaacacagacaactaaatgaatcaggaaaatgatgcatgaacaaaatgggcatatcaacagagatggaaatgacaaagataaacaaacagaaattttggagcttaaaaatacagtaagtaaagtgaataattcactaaaaatattcaatagcagactagatcaggcagaagaaaatatcaatgaacttgaagacagatcatcaagtcagaggaacaacagcaacaaaaaagaatgaaaaaagtgaagacagcctaagggacttaggagtcagtaccaaggaaatcaatatatacgttatagatgtatcagaagaaaaagggagaaaaatgaaaagaaagcatatttgaaaaaataatagctgaagaattctcaatttcaaagagagaaattgatatacaaattcaagaagttcaaaagactctagccataataaatctaaagagactcacactaagacatattatcatcaaactgtcaaaatcaaagacaaagaattgtgaaatctgccaaggaaaagtgactcatcacacataagagatataacataagattgtcacaggatttctgaacagacactttgcaggtcagagggaagtagggtgacatattccaggtgctgaaagaagaaaacaccctgccaaccaagaatatggcatccagaaaaactttcctagaagaatgaaggagaaatttagactttcccaaataaacaaaagctgagggagttcattactaccagacctgctctgcaaaatgctaaagagaaaccttcaggtgaaacaaaaagatgctagacagtaacacaaaaccactcataaataacttcttcagtaaaaataatacatcgacaaatatggtaacctgtattaatactggtgcacaaattcactttcaaattttataaataagaatttaaaggatgaaaacatctaaaactaactataaatctatataatgaatatacaatatataaaaaaatttgtgatcacaataacataaaatgggggaggtagagctgtataggggtagagcttttgtatgcaattgaaattaccatcagtttaaactgaactgttataacattaagatgttttatgtaattgcaatggtaactatattctatagaatatattaaaaagaaaaagaaaataggaagggaatcaaagcatgtccttgtaaaaaagtcaatgaaagcaaaagaaaggcagaaagagtgaaaaggaggaataaaaagttataagacataaaaaaaatgaaaatagtaatagtcctgccatatcagtaattacattaaatataaatggattaaactccctaatcaaatcatagattggtttgcaagaactaactttacaattaaagacacacagctgacggtgaagggagaaaaaaaacttccatgcagtgaccaaaatagaggagggtggctgtattactgtcagacaaaataaaatttaagtcaaaaactgttacaagagtaaaagaagggcattatacagttaaaaaagtaaattcgccaggcagacacaacaattataaatatcaatacataaaaataagagctcctaaatatatgcagcaaacagacataattgaagaaagaaataaatagctaaaatggtagaagactttaatacccccacttacaataatgtataaaataacaagacagaatgtaaataaaaatgtagagaatttgagcaacactgtagaccaattggacctaataaatatactcagaataatccatccaaccaaagcagaaacagaatatacattcttttcaagtacacatttgacattctctgggattaactacatgttatgcaacaaacaagtctcaacaatgtttaaaagtctgatattacacaaagtattgtttctgatgacgatggaaagaacctagaagccaatagcaaaaagaaaatagaaaatccacacatatgtggaaattaaactacatgcaattaagcaaagggccaaagaagaagaagaaaaaagaaaacaccgtgaaacaaataaaaacaaaaatacagcatatgaaaatgcatgggatgcagcaaaagtgatggtaagagaaatgtttatagttataaatgcaaaccttaaaaaagaagaaagaaaacaaaaatactcaaattaacaactttacaagtcaagaaggtagagaaaaaagaacaaactataccaaaagctaacacagaaagaaaagaataaagattaaaaacaaaaacaatttaaaaaatagcagaactaaaagttggttctttgaaaagatcaacagaattgacaatttcttagctacattaagaaaaatacaagactcaaataacacaaatcagtggtgaaagggggtattataactgatgccacagaaatacaaaaggatcataagggactactacaaattgtatgacaacaaattgagtaacctaggataccttgataaattccaaaaaatgcacaatatactgaatcatgaatacatgacccttataaatcaagactaaatcataaagaaatagaaaatatcaacagaccaataattagtaaggagaataaactagtaatcagaaacctcccaacaaagaaaagcttaggaccaaatggctttactggagaattctaccaaccattaaaaggataattaagaccaatcttcctcaaacttttaaaacaaatgttaaagaggaggaaactctttcaatctcattcataaggtcagcattatccttataccaaaaccagacaaagacactattaaaaaaacttagaccaatatccctgatgaatttcgatgcaagaatcctcagcaaaatactatcaaacaattcaacagcatacttaaatgattatatgctgtaatcaagatgcatttattctttgaatgcaagtgtaattcaacacataaaattcaatcaatgtaatacaccacattaacagaatgagagacaaaaaccacataattatatcaactgatgcagaaaaaaatctgacacagttcaacaccttttgtgataaaaacactcaacaaactaggaaaagaaggaaacaactttaacacatcatatgctcactgatgaaaatctacaagttctttataaaagatcaggaacaagacaataatctgcattgttaccacttctattatacgtagtattggaagttctaatcagagcaaattaggcaagaaaaataaataaaaggcatccaaagtggaaaggaagtaaaataatctctttttacagatgatataaccttagaattagaaaatcctaaaaatttcacataccaagaaaaagcgtgttaaaattaataagtaaattcagcaagttgactgatacaaaatcaacacagaaagctcagttgtgtgtctgtgtgtctcatacactaacaatgaacaatctgaaaaggagattaagaaaacaatttcatttacaatagcatcaggaaaaaaaataaatacttaggaacaaacttaaccaaggggttggaattcctgtatactgaaaactacaaatattgccaaaagaaaataaaggagacacaaataagtgatatgtttttaatatgtccacccaaagtgatcttcagattcaatgaaatccctatcaaagttataatggcatttttctgcaggaatgtaaaaatttatcctaaaattcatatagaatctctaggtaccctgagggccaaacaattttgagaaaaaaaaaagaacaaaattggaggactcacacttccagattacaagaatatttacaaattacatatttacaaaaaaaattacaaagccacaataatcaaaacaacgtgggatttgcataaaggcagatatatagaccagtggaatagtattgagagtccagaaataaacccttaggtatatcatcaaatgacatttgacaaagtgctggtaccactcaatgggaatgggacaatttgttcaacaaatagagcaaagaaaactaaacatccatgtgcaaaagaataaatctggacccttatattacactatagacaaaattaattcaaaatggattaaagatctaaatgaaagatctaaaactataaaactcctaggagaaaacagaggaaaaatttcatgctaatttggcaacattttgtgatgtgacaccaaaagcagagtcaataaaagcaaaaattagacagatggaaatccatcatagtttataacttttggtcattaaagaacagtcaacagagtgaaaaggcaatctataaaatgggggaaaaacagaaaatatgtgcaaatcacagatatctgataggggattcatatccagaataaataaagaactcctatatctcaacaacaaaaaatctaatccaatcaaaaaatgggccaagggagtgaagatacatttctccaaagatgttatacaaatggccaggaagcatatgaaaagatgttcaatgtcactaatcatcagagaaatgcaaatcaaaaccacagtgcaatatcacttcacattcattagaatggcttctgtcatgaacaacagaaaataacaagtgttgatgagtgtgtagagaaattgagacctttatataattttggcagaaattcaaaatggtgcaaccactataaaaaatgatatggaggtcctcaaaaaattaaaaatagaactaccatatgatccacaatcccacctctgggtacatattcaaaagaattgaaagcagggtgttgaagatatatttgcacactctttatagcagcactgttcacaatagccaagagatgaaagtaacccaaaggttcatgaagcaatgaataaacaaaatatattatgtacatagagtaaaatactgtgcagctttaaagagaaaggaaatcttatactatgctacaacatgaatggaactttagggcattatagtaagtaaaataagccagttttttttaaaggacaaataaacactatacgattctacttaagtatttaatgttgtcaaatttataaatatagaatgtagaatagtggttaccctgagctgggggaaaggggcaaaggggaattgttattttaatgggtatagtttcagttctgcaaaatgaaaaggttctggaaatctgtttcacaatgttgtaaatataattactctgaaattgtacacttaaaaatggttaagatgacaaatagagttgtgatgtcttcttttgttattatatagaaaaactttttcatatgataatagtctttgtttttaagctgactttgctgatattaatataatccttccatttttctttaaaatgctatatgctttcacataattttgctttacgttgatgtatttatacataaggtgggtttcttatagataccacgttgtgtgtcttttttatctaagttgatagacttgccttttgttagggtatttaaataatttatatttaatgtaattattgatatagttgagtgtgttgatttttgttttctatttgctccatctgttgttggttctcattattcctctgtttctaccttcttttgtactaattattatattttattatttttcatctcaactgttggcttattagccacattgcttttaaaatttttaatgattgctctagggtttataataaacaaaatgttagcattttctaccatcaaatatttttacactattcatgtatacttcaatttctttcttcccatcctttgaactatatcttcatacattttactctacatttgttataactcagtgctttgaaagtcaattatttttgtctttgacagtcaatgatttttaaagagtttaacagtgaaaaaaaatggctttcatctttttccattagatttcatactccttctgcctgaagaatttcttttaatagaccttgtactgcgggtctcaggcaagaaattctctcagcctttgttggtttgaaaaactgcttattacacctttgtttttgaaagatattttcactaggtatagaagtctgggttgacagttctcattgtttgtcacagcatttttaagatgcccattcaattgtcttgtcttgtataattttggattagtctggtgtatttcttacctttgttcctctctgtgcaatgcttcaaccatcccacttcaggctgcctttaagatgttttcttttcccttaatctttagtttttagctggttgacagtgacgcatctaagtgtagtgtatgaggttgcttttattgtcactgttgttgtttcttttgttttgttttgattttttttaggggtatctagtctttttagacctgtagcttctcatctttcactaattttgaaaaatgtgacttgcattatacatatactctctgtcccttcactgtctgcctactagatttgtctcctgtctttggatcaattttcttgacccagatctcagattttctcacagtatgggctcaagtcttggctcacacgtctaaattcagccacttcttagtataactgctttttgaatctcagttagtgcatgagatgcacaggtttccagagaattatttaaccccgaaagaatatcatagctacatgctgaggttgctggaaaaaaaaaaaaatcacattctcaaatccttattagatgacataatattcaggccgggtgcggcggctcatgcctgtaatcccagcactttgggaggccgaggcaggcagatcccctgaagtcaggagttcgagaccaacctggtcaacatggtgaaaacccatcctacaaaaaatacaaaaattagccaggcatggtggcaggtacctgtaatcccacctactcaggaggctgaggcacgagaatcacttgagcccgggaggtggaggtttcagtaagccgagatcgtatcactgcactccagactgggtgacagagagagactccgtctcaaaaaaaaaaaaaaaaaaaaaaaggtgacctaatctttttcaagggatctgctaattttatgtattcaaattggccaaagccctttttgtataatctacataactgatgactattttctaaaagcccatgaatagagaaatcagttgctatcctaggaatgactggaatttatcaccaaatattgatatccaaagggagaggttaggttatgctttgaaataggtaaccctataatcaatggcttagaacaataagacttgctactccttgttctgttgtccatcacccttattcaagatcccacactgcacttcagtgcttccacagttaccaagactggaaaaaaagggatgtgtagaattatgcagtagatgttaaatcttctacctgcaagtgacaccaatacttccacacccatattagtgatcaaaataagtcatacagcaaaatccaactttgagggatgccaaaaggagaaatttttggtgaaaagcactaacaaatgaccataatactaattattaattttccacaagttaaaaaactagtcaccaaaattttcatcattaccctaatataataacaataattactaaatatatgcaatattattttcaatatttgctcagtcaacatctgtaattactattttccttccaaaataaaaaaaaatccttatttttttctaccttctgtatattccaatgtttcatagggaattaagttacctctgggactctatttcttctgtctatcatttttcttttctttaagaaaccaaagattaatgcctctgggcgtagcattttgtgatcagatgttttaatttcttaactgtctgtttcacaagacacagctttccttcagcgtttttattttcctgccctgacaactgtttgattgtttctggcatctgtttctctgccttcctcacttaatgtagacacaaataaagccttgagggtttggcaatgcctccatctggtacgaatccattgctcttgctgtgttttattgctagagaccctgaaaaatcgtgagttacaggacaatgcattgactgggatcagacatccagagggcaaaattaatattttctgattcaacgagatgttggggaaggaaacgcattgttcaacgtctggaacctattttgacaagctcctactttaaggaaaacatttcagaattgaaaagtttgctaaggatatttgcacttcagttcatcttaagtagttcagggcttaagatttatcagactttctccatcagcactagttttggattttattttagcttttggagagttaatgatatcataaccaattcttcattacgcacacaccttattcaaatatgtgcaccatccactctgcctggtggatggtgtgtgtgtgtgtgtgtaacctcagcattgtctcctcatgcttcatagagccagcccaacccaatctttttcgactactctatagatagatggcaaacctaacctctgggaattatttcacatgatttatcttattagcctttccattttctccctgtgtatttcctccatatcatttgattttcaatctaaaactagaagaaaacatgatgcttttatttcttagctccttctcaagggggcattttaactgatttcccagggatttgagaatattttgcaacagagtatattaatcctcagccacaaagtaatctaatggtttggttttgcatttttattattttttaaataatgagataaaatagaaaatcttcaaaacattattcctaaagaaataaaaattaatactataaaatatgaacaaaaatttagagtatttttatatgaaattatatacgtgcaattttaataataagtttaattctaattttttacaactattgcatcatattttttagcatttggaagtgcttgagaatcaatggagaattttataccaactttgactcatcttaggacaattgttcatcttttaaaaatttatgcagagtaattttccctggcttgtttctttcctacaatcatgattggtggatggaaatattgtccctgactccagacttgagatctgtggctttcacatcattgcagggactcaaaaaattattcctcttccaccaaacttttttcaataataagtgaaaaactttctgtttttctccatcatccacaacctgcatgtgaatctgtcatacctttgcaggacagtattctcatctaagggccatttcactggcagttccctctgcctcaatatccacatagaacagtcctttttcctttaaggctttgttcaaaagccagcttctcagggagacctctcttatcatgctttaaaattgctaacttttccctttctcacatataaaccacgtcccctcttccatgctgccaattttttttaaattgtacctatcaccatctgtatcagttcaggttttccagaagcaggcaccaatacagagttagaaacacaacaaattgatagagggtattgcctatgaaagacaaaggagtgtggctgcaggagtttgtaggcgaagccttcagaccacaatgcaggtctgacttgttttggtggtgatatggtttggctgtgtccccacccaaatcttatgttgaattgtagttgccataatccccaggtgtagtgagagggaccattgaatcatgacggcagttacctacatactgttcttgtgatagtaagtgagttctcacaagatctgatggtttttttaaggggcttttccccttctcctcggcacttctccttgctgctgctatgtgaagaaggatgtatttgcttccccttctgacatgactgtaagcttcctgaggccccccaaggcaggccgaactgtgagttcaaacaatggtttgaactagtgctcaaaaaatgtgtgttaagtcaatgagtgaatgaattaaaaaaatgagtccagtagataaaataaatgttgaaagagcaacaatcaataagattctgagtttccttaggacaggtatccaaccattgtttttgtatttccactgccttgcacattgcttgatacaaactcaataaatggcgacaactatgtaaattaataaatgatattttaaaatcacaatgaaaatatttcttttttgaagatgcaagtaaagtcataactgaatgcttttacttttgtaacatatctctttttatgagtaatgccataattgaattcacagtttcagttatacagtgaatcgattgtgtaagctgtctctccaaaagaaaggtaatattacctcaggaagctaaatcacatcttatctacacatgcaattgaggggcaaaggagcagcttccctcttagagggaaataaaatctcttggggataatgtacttaaatagacaaaacttatgaagtggcttaaatcatgctgtatgtggattacatggcaaagaaaaattgctgatgggattcaacgtctcatatctttgggccaactgtgttcaattaaactaggtttcttaggaaggaaaaaatatatcagtaagaagcccatggggagggctgggaattcactgataaatagtacactgagcttaataaataagatacggattaagagtagacctgaaactgaattgtatttttgtaggttgcacacttcagagttctgctgtacagagcaatgtgtggtgaaacatattgtgatcacttgggcacagatggtacagagctgacaagtctaaaactgcaaggtctgtaacagtaaactcatcaccataagaaagaagccaaccaatcacctctaaaatatgctgtgtttctgccttatgtttactaaagaaaactgggaatgcatgtgaataaatgtattgtcatgttacaatcacctgaaaacagttctttacatacttaaccaacccttgacttataaaatgtcattttcatgatgatccacatgttccaagactttgggtttgtaataaaatattataattgtcctacttggttgattgtggtgtaatttaaatccacatttaagaaattcatttgttttaaaatattgataattcaactgggcgtggtggttcatgcctgcaatactagcacttcagcaggttaaaatgggagcgtagcttgaagacaggaatccaagaccatcctgggcaacaaagcaggaccccatctctacaaaaattaaaaaataattagccaggagtggtggcacatgcctgtagtctcatgtagtctcaactacttgggagactgaggtgggagaatcgcttgagctcaagagttcgagttccaggctgcactgagccatgatcatgccactgtactccagcctgggcttcagcacaagagcaagactctgtctatctatctatccatctatctatctatctatctatctatctaataaaagaaaaacttcagccgagttaaatttaaagaagtttaattgagcaatgaatgattcatgaatcaggcagcccccaaaatcacagcagattcacagagactccagggatgcctcgtggtcagaacaaatttatagacaaaaaaaggtaaagtgacatagaggaatcagaagtgaggtacagaaacagtgagattggttacagcttgtcatttgccttatttgaatgcagtttgaatattcagcagtctatgagtggttgaagtatggcatctgggattggccaatactcagccatcgttacaggtgcatactattaagttaggttttcaattttgttggactattaatctaggttagagttcatccacaaggactcaaatgtagaagtacagagtccttctcaggccatgttattttgctttaatgtctgtgtgtgtgtgtgtgtgtgtgtgtgtgtgtgtgtaataaatatataattctctttaaattaaaattatgggaatttacagactggattttactatctacactcataatcacatgtcaaaaataaaacagatacaaagttttccctcaaacctgaagacaaaataatgtaattttaatttaaattatctgcattttataatgactttagtagaaagcttaaaataggaaaacttctcccccaactaagtgaactttttctcaagacacacttaatatactatttaaagaatacaacctcaatttttaactttgtctcccatgaataataatagtaccagctgaattcagtacgatctccgcctcaggcacattgtgaatttgaagtccttgcaatttctcattctctttaagtcaaaaatggacttgaaatgtcataagaattttaaacctagatagaaacaactgtctagctcagcaattactgtgccaccatgtcctatgcaagattcatctacagaaattatcacaaatgatttttataaatctgtaatttaaaatagcacactttaaaataataaaaattataaattaaattaagcattattatagaaaatcattggccccattgcagaagataatttaatgagtcttcatttttgggaaatgacagtaattgaagagcattatatatgtatataatatttttatatataaatatatatgtaaacatataaattatagcagctaacatctactataggctatttacaaatttatatatatgtaacttatatgtttcatatctataacatataagttcaaaaatctttctattataaatatttcagaaaattgttattcttgaaataaccaaaaaattaactatagaagaaatacttatatttttaaaattactgatagccaatattttatgctctaaaatattcacaaaactcaacaagaaatatctaaactccccatatatagatgggcaataacattgatacaaagtaagaaatataggctaaaacaaatttctgtgatatactgtgtcactaataaccctataaatggaaatgagagcaatataacgtaacataattcagaatagtcaaaactctgagctgaaaagtcaatgccagtgaagataagataaaaccactacacttctgagaaataaattggtatacttattttacagacaacaatttgcattacagcaagtggaaatggaagcacgctatattgtattctatggaaaataactacaggttttaaaataccaacatatacatgacagaaaagactagttttgatgaaagaaaaaatatccagtgattattccagttgttttaggatggtgaaattaacaggcttttctctgttctacttctatgcattggttttaatgtttttataattttaaatgatgattataaagacacttttgaaacatgaagatatttattatatagcattgactaaaaatatattctggtgtaacttggagtttctaaaatatgaaaaaaggaggtaagatattgtaaaaaacagaaatgtagtgttgttaaaattttaaaaataaggatttttaaattatttttcattgcctttctttttgtggtgacatcttttaaacaagaagttgaatgatcaatacatgtttcccagaagctaagattctctatgatttgttggcaaatatatgttttgtaatagtcatccaaattctatcacagatgcagcttttgtgtgctagaattatttgaccacgcaagaactgatttatttttaattttatatatattattatgccacgttttggacttgtgaaacatgcaatatgaattttttcttgttgaggtttctatatttagacagcatatttttcaggaaagtaaaaggtttatgtagctttttagaaaaagcaaacattgtgatgttctggagtaggcaaaagttagtacagaaactactgattcaaaacatcgacttgctaatattgagcttgcagtagatgttagctgctgtgttttgaaaccttcattagaccacagttttagacacttaggttatttaacagcaacagtggcaacaagaacaacatcaaaaatttattaaggccgcttctgtgcctggcaccttatcgccagtctcaagtttaattcatatcccagccctatgaggtaaggttattattattcctattttatatataaagaaacttagtccctgagagatttggtcatttctccaggaacatgcaaggaggagtgagtgaaagagatcaattgcaagccagcgggaccctggaactgaagccttcacctagatctccctccctcttgttacactttccttatcacttctctgtctacatatgatgcgcttcatctataatatggtttggatttgtgtccctgcccaaatctcatggcattttggaggaggggcctggtgggaggtgactggatcatgggggcagatttcccccacgctgttctcacgatagcaagtgagttctcacgagaactgatggtctaaaagtgtgtggcacttccccatcactctttctctccctcctgccaccacgtgaagggggtcagtgcttaccctatgccttccgccaggattgtaagtttcctgagatctcccagtcatgcttcctgttcagactgcagaacaattagtgagtcagctgaacctcttttcttcccaaattacccaggctcaggtagttctttatagcagtgtgagaatgaacgaatacaatctggtccttcatacaataacaagcatgcttacaatgtgccctcaaagagcacccagtcacttactcctccaggtaatcaccatcactgaacatcttcatttaatttatagcaaaagcttctcccttccttcatcctgaggttttctctggcttgaaagattctgttggagcaggtgcaggtgagcatcctctccttccctactttgcttttcttctcaacttcctcctccattcaccagcttaggttctaccccatgcagggtcaggccaagaagtgagagatcaaaagagattggatttgatttggggaaacaaatgctgtcatgatctgtgagggtgtcttctgggtaaggcaggcacccagctttgaatctttctttctgaagtgctgggtgaatttttcagattctccctctgggaaaaattctcccactaggagcaatttgagagatctactgctccctccactggcttctttctgcttcagtttgctaccttctcttccatgcaatctgcttggagaatccctctgtgtgaacaccgaaaagacagatgtttgtttcaccatgagttgaactcatctctgatagaaagcaacctgtctctttctctttcctctgtctctggcagatctggactcaccttccattgcagccctcagactgtccaaacctgggtgagacaaactccctgactttcctagtgattttcttcttcttcacctctccttgggctatgttaaatatctcttctcgttacccatgttgtagggaaaggagagaggccacagtaggcagggggcaaagagcatttcaataactatgaataattctattattaaagacaccttgtaatgctaatgacttataaccctaacactagcagaaacagttttaccatttcttaccatattccagccaagtatactggtctcgctttatgaaaagtgagtgctctgcatttactgtattgttcatgtctttgggttctagaggcactgagacactaagaatctcattttaacaatataatgtgtaccacaacctagttctttccagcaaccctctctgcttgttagtttgctatacaactctaggttctgacatctctgctcccatgccctttccttcacttggaatagagagcacaaaggtaggattttttttctttttagttctgatgtattccttgtatctggaccaacacttactatactcacagtgactgaatataaattgacttcctcaaagaaaagaagggggcttcactcaattgtcttttagttaatcttgttctaacctctgactcatgtctcctacattctgattgatggtctcaaacatctggttggagaggtcaaaaatgcattaataggctcagtcttctaagaccctctttagaaattatggaggaaaagatttctacccaagcacagctttgcaggattggaaatgatgccttcattaccaagttatctattatgagctatcctcaagtaggactcaccagtcatactttagaactgaatgatactataagacattaaaaatattacttcttttcaataggcttcttaactagattaagaaatgagctaacacatcatgtagttggtagcctcacagaaggtctccagtaatccttgcttcctgatattcatgcctttccctgtgtaatgtgggtggacccagtgaccctccaaagaatcggttttgacaaagtaaagggctgtcacttctaatattagattacaaaaagtatggggcttccatcttgggttctatttctcactctccttctggtccactcttagggaagccaccttccacttagtgagctgctctatggagaggcccacttgttaggaaattaagggtggcctgagctaagagtgagcaagagaccctgactgagagttactaagctaagccacagcttgatccctgacccacagaaaatgtgacccagtagatgctgttttaagctgtaacatttggagttagtttgctatgtagcagtaaaaaataataaacacgcagaaatacataaataatgatgcatgcgttttgcttagatagtaaaacatatacatttccttcctaatttattgatttgtatttttaaataagtgatcaaaccgaaaggattttatatctaattttcagtccaagggaaacttgctataaacagaacaccttgttaaatgagtattttatataacaaattgtttaatcaggagaggattcgaaatattaaatccttatacatacctagtgctctatagtctctaaaggtcattcacatgtagtatttctctaaaccttttatagccttgtaatgcagatattaattttatttacaggtgaaaataaaactcaaaaattgtgatctcatgcatacacaattcacacatttttcccttagaacaccttaagccctgtctttatccaacaaactcttcctcatgcttcaaaatccagttttactctatcttcctcttaattcatctcctgactcccattgctataaaaagaatgttcatggcaccctaaaattcatatgttgaaaccctaacctgcaatatggtggtattaggaggtagggcccctggaaagtgattaggattagatgagctaaagaggatgaacctttcatgaatgggattagtgcccttatgagagtccttagagagcttgcctctttctactctcctccatgtgaggatacaatgagaagtcagccatctacaactgggaagagagccctcaccagaaaaggaccatgctggcattctggtcttgaacttccagcctccaaaaccctgagaaataaatttctgttgttatgagctacacaatttatagtattttgttataacagcccaaactgacgccctgcagagttcatgtctcccatcatttgcatgtacatatttttcttcagctttcacagtctcacaattcctcttccatggtggaaacttctttactggctgaaagcttctcttaggcaggagctacgcaatattctttttcataccctcaatacattacaatacctgagatagcaagtgcttagtaaatgagtcttacattattgaataaagcattaaatttggcatttttaatggagtggtattgcttccaaggggacaagaattgattcttggggagaaggtctttaaaaacttacatatggccgggtgcggtggctcacgcctgtaatcccaatgctttgggaggccaaggtgggcgggcggaccacgagatcaggttattgagaccattctggctaacacagtgaaaccttgtctctataaaaacacacaaaattagccgggcgtggtggcaggcacctgtaatcccagctactcaggaggctgaggcaggagaattgcttgaacccaggaggaggaggttgcagtgagccaagatctcaccactgcactccagcctgggtgacagagcaagactccatctcaaaaaaacaaaacaaacaaaccaaaacaaaaaaacacaacatacacaatatacaactatgaatgtcttacagtccataagtaggtatacagtacgatcaaaattttaatgacatttagctaattaggaaaaacatctagaaagactacttcttagaagagcaacaatgaaaaaagttgaaaaatactgtattaaatgaaccatgtaaattcaggaggtaggactcgaacacagatttttctgattgagctagatgtcatttcctttatgccatcatctcttcagcaattaaaagaaaaaagagaaaaaatttacaaacatgtcttctctgaaaacaaagataattcagaagctattttatatgaagatatttccttgtgttttattttgtcttttgttttcctcgaccactcaaaatttgctaagcttttatacatacacatacacacgcactatacatacagcttatttagatgaaccctaatgatatggctaatccactttacatgatgagcaagccaatataaagtttatccttatttgtatttaatcatttaatttgaaacacaatcatatgggccaggctttgcagatgcctttcttgctatgtagggagttgacaatggtaattatctgatttgctccaacaaagttaacctcagctgaggatttccagcccattaacaatcacctacagtttgcagcgcaaatggatctcccactgtcaaatcggattagcgctttccttggcctttttgaatcattccctgacaaaaaatcaattggtagaactgcattacagctgtctgtcatccatttgaatcagcttcatcatgaccatttgtcaaaactagtgccaaataccttagaaaatttgacaagataatggtaatggctgttcaacattcagtgtatggaagatttgtgcagcaatctccatcataaaacatcaacactactgaatacctattgtgaattattatatgtaaaaagcagaacatcagtatttgctctctggaatctaaaaatgtgtgtgaacttcagctaaacaatgagggagaacacttagatccaatttataggagccagaggcaaaacgtacacaatgaatgtgcaggtttatgagaatgaacatgtttcctttttaaatctataatcgacttaaaaaatttaaaaaaaacactaatctattaaagcaattcccaggcagtgtcaaacatccaatgaacttttacactttgtatggcatattgttaatgatcggtaaatatttttgactgattaaatcattctcattaaattgatctgtgttaaacagtttaccctttcctttgaaatcacgtcttccggttgaaaagctaagaaatcagtactttttaaaaaaaattttaaataagaattcttgttctgtgactaaataaaagtgtggggatttaagaaagaaaagtgaaaatcaatgctaagtttttcagaattgtagccttatgcaagaatgtacaactcactgtcccctattcacagtaaggcccagtttactaacatcgattacttagttttccctcccttacagtctactggcagagaagcaagcaggttcaaatacacactctgtgttagggatagtataagatttccagaatattaaccaacatgtttttggtggtgttgtttttccccctaaaatggcttttatcccacatcccttcctccttgtccaggctgctcttgtctcagggaaagcatgacatagcaagagaaagaaacatgcctgcccttgctttaaaatgtacaaagtccctcttctggaataaatcaaagggactcctgtgtaggaaaatacatgcaagtgggaaaatatgtgagaatgtgagggagagattctgaattcaaaagatgtgataaaattcccaggataggagcagaagaaatttagaggagaaacaaaagctgagtagatgctgtgggtccccgagtaaggacacttgcccacccgatcttttaatgtgagcttagggaagaggggaggcagaaagggcttaaggtgtctgacagaaactacctgtcataaggctgggcacggtggctcacgcctgtaataccaacactttgagaggccgaggcaagctgatcgcctgaggtcaggagcctatccaacagggtgaaaccccatttctacgaaaactacaaaaaaattagccaggcatggtggcatctgcctgtaatcccagctactagagaggctgaggcgggagagtcacttgaacctgggaggtggaggttgcagtgagctgagattgtgccactgcactccagcctggatgacacagtgagactccgtctcaacaacaacaacagaaaagaaaaataaagaaaagaaaagaaacaaaactacttgtcgtagactgtttgagtggcaactaaacaccataaatgccaccatttcctggtgccttctcactgtgtcctcatatgatgaaagggacaaggcatctctctggtgcctcttttataaggacatgaatcccatctatgagggttttgtcttcattctctagtgaaagaaattttttcttctttctctaatggaaacctcccaaagacccctctcctaatatcatcacattggtgatcaggtttcaacaaatgaatttgggggagatacaaacactcagaccatagcagtatttttctcgatttgccctttttcctgggtagaatttccaggaagcaatgaaaccccagaggacaaatgcctgtgggatgtatcaaggcagacagactgagcagcatcaaataattcccggtgcctcagcaggagctgcaaaatcaatgggtttcccctgtccctgagtgtagcatgaaatgggaaaggacatcagataatgtcacagagggtcctgaagtccagtgtagggcaagggagtagtagaatgatctcaaactgtcaagaagttccaggctgggcatggtggctcacgcctgtaatcccagtactttgggaggccgaggcaggcaagatcacgaggttaggagatcgagaccatcctggctaacagggtgaaaccctgtctctactaaaaatacaaaaacttagccaggcgtggtggcgggtgcctgtagtcccagctattcgggaggctgaggcaagagaatggggtgaacccgtggggcggagcttgcagtgagccgaggtagcgccactatactccagcctgggtgacagagcaagactccgtctcaaaaaaaaaaaaaaaaaataagtccagaaacaccttacagatagaaaagcaaaagaacacagtagtaatcttaacagaccaaaatttgtaatcagttcataattcaaaggacaggtgatgacagaggacaggaaatgccatctgcaccccttgtctgacctcaacactcatccttgacaatcaccaacctatagttttatttcacaagaattttcacaatgatttcacaatctttcctttccttttttttttttttaataagagtagacctatgggtaaagaatgggctctctcttctctcattcattctccgatgtaaaggaacaacatcagatccaactgatctcattcataacaaatgttataagctttcatgcaaataactaccatcctgtcctttatttatcaactttttcctgaactgcaggtactggacagttactcaaaaagggcaaaatataagaaaaagtagagttaagactgggcaatgctttttaggcatgctttacctccataacaaagattataacaaaagtgaagaatgagcacatagattttgttttgaaaattttcaatagtttatgcaaatttccaaaggaaaaaaaatttaatgtaaccatcttaggaaaggtcattctgcctaataggggaaaaaaatgtatatgtgacttgagctgtctgttaaacagaaacataaagttgtctgttaaacataaacagggaggaaacgtatgttactgttaaacataattttttgtttatttgtgatagaagtaataataatttactaagcattattaaaatttaagaagaaatgagtttgttctgggttatgaaaaacagaactcagaaagattctacatgtcacaccggcaggcaacacagcattaacaaatgcaactgtccaacaactcacaagctctacttcctttattttttttctgttttccaggtgcccccttcatagaatttctcattcattgatgtggtccaataccatatcatcaatccctgtgtccctgaagcaaattcatcaagtaatccattatgctcaaagtgggcgtaaaatatttttatttatccacagaaagtctggatcattctacagatttctttgtttacttcctcagacaccccactcctacccatttttggaaaagtgtatataacatgcaatcgattttcacattctatcctttcttctaggtaatgacagggccagtttacaaaaaagtgtgttcatttcctcctttcagagtctccacattgagcccaggtgcagaacatgtgccctcatcatgccaatatccttctgctgtaaggtatggagtggagcgaagtcatgtgctaagatcagcccagggtgggtgttcattctctcaggctccctttgtccactgctctctcaaactctctttaaagcatggcaagtaaaaatggtgaatgttcctttctgaccaatttttttaaaaaaatcttgaatactttttatttactcaattgaagttttaaatacctaaatttagaaacttctatattatttctaaattagtgttctattttttaatatggtagcaggaattaacaggatacatggtaggtcttaaagatgagagattttctatcttaaatgtaggaataaataaacatttattgtataacatagattttcaatgaatattttgataaagtagaatcagaaatataaattcagttgccctagaaccatctgggtagctgaagatggactctaaagagcaacaaataataataattaacatttattaagcattcttcctaaaggtaaaaatgtattacctcatttaatcttcataataaacctatagttaggcactgttatttcctcattttgctgataaggagactgagaaacaaagaagttaggtaaacttttcttacagttaggaagagagagagcctggattcaaatccttaccatcttgttccacagactatatttaactagagtgcctctaatatagaacaagtcaaggccttcaactgatgcatcaataagaacaataagataaagaggcagaaaatggacatacaggtgattggtagatagctagctagctagctagatacaaacatacatatatagatgatagatagatagatagatagatagatagatagatagatagatagatggatagataatagatagatacttagagaatggacggatggagagagaaaatgatgatgatgatgatgatgagaaactgatgtggatggatggacagatgggtggacaaacaaatgaacagagagatggatgaaaaataaaagataaaagattgatcacatccctgtttccaaggctgtaattcaagctggtccacagttcaagtttcacatcactcttggaatttgtattttttccattcaaaactatcttcaatttattgtgctaggagccacagatacagagatgtccaagaggctgattctgtccttaagagttcacagtcaacaagcggggacagagaagaaaataaattgctataaactgcacagcaaacataacagaagtaagccaacgccaaaaagggaaaagtaggggcagaaaagaggggaaaaaaatcaagcgtctatatgttgctcttacaaaatatcattcagaactgcactcaaatctgtatatgtgaaatgtctaggctgattgaatagggagtttccattttcagtcttttggtcaggctgggaacagtagacctggggttgtaaggtgtacaaagagtacaggagcctgggaagccagtttctgtgcagcgcattgctcagaagcaaggatttgggccagactaatctaatttaactcttaattaactgtcatctggcacttaagaaatctgtgggctacgtaaaattaatgatagttcagtaaatatatactgatgctgacctaaatcttattcctaacctgaatcatgttcagctccttttaaaaactgaacatcattttccatcaaacgtctattgaattttaattataactcatattcatgagtgttttctacgtgtcatgcattattttaggtacttcacaagcattttctcacttaaaactcacaaaacctcttgaatttctactactccctagaggaaattgagccactgaaaggtaaagtagaatgcccaagatcccagagctaatagatggtgaagtttaaattcaaccccagatggtcagattgaagagtctatacttgaaaccatcttactatagtgccctagcaccaacagcatctttgttaatgcatgttactctattttagatcaaatatttaccccagaagttacattgaaagcatgggccacttctaagcttggctagttgtaaataaatacttttcaaaggaaatgatctaagattgttcctattcatatcactgagccaattctggcttaagggatagctcagcatatacaagttcaatgagtagtaagaaaaaaatccctatgcaaaagttgctgtctgatttaatagaattttttaatttctgtgtatctctgtttaatcttacttggcttttaatagtccatcaggaggaatgatattcaaatgctttcaaataaatttttgtaatatgcacatgtagataagaagaatatttcactaatatctaatttccttatttgttactatcgctcactattttctttcaaaaaaacaaagttttctatgtcaaagaaggtgttttatttttaccatgctaagggtattagcacaattgcatctgttttagatagatattgtcatatatgatcagtatttgtactaataatgtagtcaaaattataatattattttatgttaaaacagtttatcacaataattgttaatattttcctttgaattgtactttctgcttgtttggaggctttgtgctacactctttatgtgcataacaagagaataaatacattgttatattcatataacagaataccactcaatgataaaaaaagaaatgaattattaattgacacaaggacatagatatatttcagaaacacttcatgaaacaccttcaaaaggcatttgctggaagaaaacatacacacacacacacacacacacatacacattcatactgcatgattgcattcatatgacctacaagaataatcaatttatgataatggaagtcagaaaaatagtacttccgtggatagagaaaattgactcgaagagcacataagagattttgtgataaaaatatgtttattggagtggcggttatgtggatgtatataattgtcgaaggtaatccaattgaacctttaagattcacgcttttgtattttttgtgcttttttcctcaataaaaataaataaataaaaggcatctctgcaagaacatgtactcggttctctgaatactttcatgcatattgataatacaggtatacctgtctgtttatatcagtgtttcttaaccttggcactactggagttttggacccgatgtttttctctcagagtgggtggagagggctgtcctttgcatcgcaacatatttagcagtatccctggtcgctacccactagatgccagtaacatccccaggttatgacaaccaaattttcttcagacattgccaaatatttcctgggatggggctggggggaattgacctagctaagaaccactgatctacctgtatatgtacacaacaaatcctacctaatggaatctttaccagaatgtgcgtagtgattacctttgggcaatgggaatatagactacttacttacattctttctgtaaacatgtgttcatgtgtatgtgtttatacacacatacatacaacatatatcattttatccaaatatagcatatataattttaaaatctaaatatcttaaaaattagcagaaacttgtgaaaggaaatcaaatcttgggacccaaactcatgaaaccaaaggaaaaatttaagctggtaactgagtcacacaaacctacctccctctttgggttcctaaataagatgggtacaagatgaaaaggtacaggcctaccccatattttgctcacaaggaaattcctagttagctccaagatctttaccctaaggtgtttctgttaagatttcaccatggcaatgtgaattgatagcttagttttacaggtgcagtcaccatcctgcccaccagacacaactgcacatctggttatttccctgccctattttgtcatgttatcttatataaaaatgcagattctctgcatttttcctatgccccatttgtctatctcatcttaagtaaaaatgcagattcacgagccagacaaacgcatgaatgaccattttttgctactccccctttcatgaaaagtgtgtacttctcaatattctcccctttctcctttaaatttggagccttaaaattatctttagagaaaggcatagacctgcctcccagtcaggctcacatccttaactttggcaaagaaacttcctaaaatgattgatacttgtcatttttctcgattgacaatctcttataggaaaattcaaacacagtccatttctccatgttgctcatttgccactttttttttctcaagacggagtttcggttgcccatgctggagtgcagtggtgcaatctcggctcactgcaacctccacctctcaggttcaagggattctcttgcttcagcctcccaagtagctgggaatacaggtgcatgtgaccacgcccagctaattttgcatctttagtagagacagggtttcaccacattggccaggctggtctcgaactcctgacctcaggtgatccgtccacctctgcctcccaaagtgctgggattacaggtgtgagccaccgtgcctggccacttatttgccactcttgtgtctccacctgacttctgcccatatctccatggacatggaagatcatgagtggcaggatggctggagatgagattctgtaaggctcacagcagctggaggtggcaaaaaccacagaataaaagcaaggacagagcagttctgatgcacctctggagccaggctctggtattccccaaagtaacgaggctcagaaatggtttataaagttggaatttggagtcatggcctgaaaaatgtgagcaagtaaagaacaaatggggcagaaagaggatagatgatggtgaatcttcaaaggttagcctttgaagtttgctatcttaagaggcagctgacgacttagaaaatgagttatttctactcaatagaaaagaaatattgtggaaaaagtatgcatctgaaatgagcatgaggccttctacattcattcagcacaattttggacctttgattttgctcagggctctctgtaataccaatctgtctcagtgcctggcgagtttcagatccttttctgtttatctcatgtatcttgttctgagctcatccctaagacatcacaagagatattgatttcttgacttccggacacatagtgttccttacaacatgcctgtcctcatcctctgaaattttctcctctggtccttttgagcaaccatccactgacccaattgaatcccccatgaccctcctatatcaaactgcataagggtgtagaacaggacggtcacaatgtaccatggagattttaaatcctttgtaaaatatagaaaacagtaaccaaataaaccccaaataaagcagatcaacagttttttaggtaaagcaacctaaaaactaacctgtctacaaaaggacaagagtaaagttatcagaggcatttgaaccaaagtgactccattttgagtgagggctaggaaaatgaggccgagacctgctgggctgtattcccagaaaattaggcattcctagcctctagatgtttactgttaaaggaaaaactagtaatatttattaaacagacccatcttgggagtgtccagatatctcaatatctagagaacaaaggcattcctaattttgctttaaagataataatatcaattccttaaaaatacagtatttaagaaaattaatcctttatcacaaacccttatagcaaaatacacctccccatatatacaagcattgctatgtacagtgaatgcattcctcctcttacttttaggcacgccctactctgtctatggagtagctgtcttttcatcactttactttcttaataaacgtgcttttgctttgtactgcatacttgccctgaattctttcttgtgtgaaatccaagaaccctctcttggggcctggatccagaccccattcatttaacaaagtgatatggtttggctctgtgtccccatccaaatctcatcttgtagctcccatagttcccacatattgtggtagggacccagtgggagatgactgaattatgagggcgggtctttcccatgctgttctcatggtagtaaatggatcttatgagatctgatggttttaagaaacaggagttgccctacacaagctctctctttttgcctgctgccatccacgtaagatgtgacttgcccctctttgccttctgccatgattgtgaggcctccccagccatgtggaactgtaagtacaattaaacctctttcttttgtaaattgcccaggctctggtatgtcttcatcggcagcatgaaaacaaactaatacataaagattgttgattttaggcaacttgcttttgcttagtacaagttactagatagtgagcagtaagttggaataacataaattctgatgacggtaccctgtcatcttcatcttgggacctcataatagttactgctatcatttgaagtaatacaaacacaataaagaattatttattttaattatctataaggcagatttacataaatggtactggaaatttaacctttcatttcttatcttaacctatctaaataatgagatcacaaaatgaatctctaattctcccttcaattctattgatcagtatcaataatttttaattaggcaatttctcatttgcagatcttgcaagtatttatttaatcaagtcagatggttttatctagctgatctaatttataaaagcatcatttttaacaataagtaggattttgataatagtttattgtagtgatctacatattatctgaaaaagctaatccaaagacaaaaaaactaacattactctcttatattttctgtttttgataaacacaaactcttaaaaactaatgttactgtattatcttttctgttttcaataaacactaactcttaagaactgattcaacaataatgtggctaaattttttaaataattgtattcattagggcattcataaactcttactctaattttaaaaatcatcattttgattttctctaccaccaaaatgaaaatgtatcgaatgctttatcatcaaaattacatgtaaaaagatatcaagggtttagggtaatgttagaatatatttctacactaaggtattatttaggattttttaaaaaataggtattttacaactcagaagaaacttagaattggaaatatgtatggaaatcttttttcctcaaaaatgagaaatgggttataaagaaaatgaatataaatgctaattcaaatatgaaacttttgcttttgaaaatctccttgaatgttctgtatttaggaaagatgatttaatatttcttgaaatatgtcctttaaataaactagtttataatgttctcactctttatcatatcaaagcaaagtaaatctcgatgccctctaaggtaattatttgcttgattaaatcccaactatgtggaataatttcaatttggacaacatacattgtctttctatgataacatataatagtctaaaacacaaaggccatagtttatcctggccaaacatttaactccaaagctttatgcatttctgaattctaaaatctccttatataactaatattacattcattttattgaattccaaaaaaaaatctagttattgccaaaatagtgatttccaaatataatttataaccaagaaaatatgatcatggaaaactgaaaaggatcaaatcatttgatcttctaaacagctatgagcttttaagaaaaaacaaatgtattatatctaaaaacaaaaagataatcacatttgaattggtttctgtatatttctgatacaatttaatatttatagcttttaaactataacagctcagatatatttatataacaccatattatgtgaaagtaaatatttcataataaagtctttaaattgtcaccaggaaatcattttaaaaaatgatatgctgatttctaaaccagtattttatctgtaaattgttttcaaagttgtttattatattctggtttttaaaaatagttcacagtatacttaataatgctattgtcaaacaacatattacttatctttaaaacataagcatagcttttaaattgtattcccatttaatgaaataaagtgaacaccaggtagcccttatatctgtaaaaattacaatatcatatttttttaggtttacaaaaaaaaaaaaaaaaacacctgatcctttcaggatatctgagattcactgcaaaataatccagtgggggaggggaataatagatgaaataagagtggccatgaatggatcattaatgtcaggtgttgaatacatggtcggggggagggggaaagagaaacaggactatactatatttagtaccgttttgtatatggttggcagaaaaagttttaaaactgcatataacttatacgcaatctatgttcataaaacaataacacaataaaaataaggtattcaggcaataaatagcatgatgaatagaatagtatgtcacatctcaatactaacattgaatgtaaatggcctaaatgctccaattagaagatatagaataacagaatggataagaactcaccaaccaagtatttgctgtcttcaagagtctaaattgacacacaaggactcacataaacttaaggtaaaggtggggaaaaagatattacatgtgaatggacaccaaaatcaagcaggagtagctatccttatatcagacaaaacaaacattaaagtaacagcagttaaaaatgacaaagagggacattatataatgacaaaaggtcttgtccaacaggaaaacatcacaattgtaaatatttatgcacctaacactggagctcccaaattttaaaacaattacaaatagacctaagaaatgatataggtagcaatgcaataatagtgggggactgcaaacttcactgacagcactagatgggccatcaagacagaaagtcaacaacaacaaaaaaaatggacttaaactatagcctagaacaaatgtacttaacagatatttatagaacattctaccaaacaactgcagaatatacattctattcatcagcacatggaacattctccaagatagaacatatgctaggccacaaaacaagtctcaacaaatttaagaaaatcgaaattacagcaagttctctctcagacctcagtggagtaaaattggaaatgaactccataagaaaccctcgaaaccatgcaaatatatggaaattaaacaacctgctcctgaacaatcgttgggtcaacaatgaaatcaagttggaaattttaaaattctttgaactgaataataaataatagtgacacaacttatcaaaacctttgggatacagcaaaccaatgctaagaggaaagttcatagcattaaatgcctacatcaaaaagtctgaaagagcacaaatagccaatctaaagtcatgcctcaaggaactagagaaacagaaacaaaccaaacccaaactcagcagaagaaaataaatatcaaaatcagagcagaactaaatgaaattgaaacaaaaaaacacaaaagataaatggaacataaaaatgtttctttgaaaagataaacaaaattgatagatcattagtgagattaaccaagaaaagaagagagaagatccaaacaagctcacttagaaatgaaactggagatataacaaccaataacacagagatacaaaagatcattcaaggctactgtgaacatctttacatgcgtaaactagaaaacctagaggagatggaaaaattcctggaaatatacaaccttcctaggttaaaccaggaagaaatagaaactttgaacagaccaataacaagcagtgtgattaaaatgacaattaaaaagataccaacaacaaaaaaaaattcagcaccagtgggattcacagctgaattctaccagacattcaaagaataattggtaccaatcctagtgacactattccacaagataaagagggaatcctccctaaattattttatgaagccagtatcatcctaataccaaaaccagggaaggacataacaaaaaaagaaaactacagacttatatccttgatgaacatagatggccaaaatcctcaacagaatactagctaacagaatccaacagcatatcaaaaaagataatccaccatgatgaagtgggtttcataccagggatgcagggatggttttaaatatgcaagtcaataaatgtgatacaccacataaatagaaccaaaaacaaaaatcacatgattatctcaatagacacagaaaaagcatttgacaaaacccagcatccctttatgattaaaaccctcagcaaaactggcacagaggggacatacttcaaggtaataaaagccatctttgacaaatcaacagccaacattatactgaactgggaaaagttgaaagcattgctcctgagaactggaacaagacaaggatgcccactttcatcgtttctattcgatatagtactggaagtcctagccaaagcaatcagacaagagaaagaaaccatgggcattcaaattggtaatgaggaagtcatactgttgctgtttgctgatgatatgattgtatatgtagaaaaccctagactccttcaaaaaaaacccctagaactggtaaattgaattcagcaaaatttcaggatacaaaattaatgtacacaaataagtagctctgctatacacaaacagcaaccaagctgagaatcaaatcaagaactcaaccccttttacagtagctgcataaaaagaaaaaaaaaaccttaggaaaactacaaaacactgctgaaagaaatcatgataacacaaattaatgcaaatacatcccatgctcatgaatgggtagaatcaatattgtgaaaataaccatactgccaaaagcaatctacaaattaaatgcaattcccatcaatatatcatcatcattcttcacagaacaagaaaaaaagaatcttaaaattcatatgcaaccaaaaaaaacccacatagccaaaccaagactaagcaaaagaacaaatctggaggcaatacattaccccacttcaaactatactgtaaggccatagtcaccaaaacagcatgattctggtataaaaataggtatatagaccaatggaacagaatagagaagccagaaagaaagccaattacttatagtcaactgatcattgaaaaagaaaaaaaaaaaaaaaacatgaagtggagaaaggacacccagttcaacaaatggtgctgggataattgacaagccacaagtagaagtatgaaactggatcctcatctctcaccctgtacaaaaatgaactcaagatggatcaaggccttaaatctaagacccaaaaacataaaaattctagacaataacattagaaaaacccttctagacattggcttaggcaaaaacttcatgaccaagaacccaaaagcaaatgcaacaaaaacaaagataaatagatgggatttaattaaactgaaatgtttctgcacagcaaaagaaataatcagcagggtaaacagacaactcactgagcaggagaaaatcttcacaatctatatgtctgacaaaagactaatatccagaatctacaaggaactcaaacaaatcagcaagaaaaaacaaacaatcccatcgaaaagtgggctaaggacatgaattgacaattcttaaaagaagatacacaaatggacaacaaacatatgaaaaaaatgctcaacatcactaattatcaggaaaatgcaaatcaaaaccacaatgccataccacctcattccagcaataatggccataatcaataaatcaaaaaataatagatgttggcatggatgtggtgaaaaggaaacacttctacactgttggcgggaatgtaaactagtaaaaccaccatgaaaaacaatttgcagattccttaaagaactaaaattggatctaccatttgatccaacagtcccatttctgagtatctacccagagaaaaagaagtcattatacgaaaaagatacttgcacacacgtttatagcagcataatttgtaattgcaaaaatatggaaccagcccaaatgctcatcaatcaatgagtggataaagaaaatgtggtatacatacataccatggaattctactcagccataaaaaggaattttaaaaaatggcatttgcagcaacctggttggaattggagaccattattctaagtgaaggaactcaggagtggaaaaccaaacatcgtatgttgttactcgtaagtgggagataagctatgaggatgcaacaggattagaatgatatgatggactctggggacttgggggaatgggtggaatgagggtgagggataaaagactacacactgggtatagtgtacactgcttgagtgatgggtgcgccaaaatctcagaaaccaccactataggaattattcatgtaacctaacactacctgttcctcaaaaacctattggcataaaaatcaaattaaaaagaaactttaaaaagttttattgaggcataattgacaacaaactatagatacttaaaatgtaaaatttgagaagactgggcatatgcaaacacccatgaaaccatcaacacaaacttgagtatatcctttatcccctcaaattttctcttgcttctctataatcgtttcctcttcccattacttgctcccttccttgagcaaacactgatccctacatggtgtaatattttgacccatgataccaatatcatgtatttagacccgaaacatggaagtatcacaaaaatgtgatttttttctttaaacaaaatgtacagttgtttcactgaatgtaaattccctcttctaattttttaacataaaagtgaacccacgtctacattatgaagtgaggtgtgtgtgtgtgtgtgcaagattactcacattataacaaattgtaagggttcccttttctaatacataacaattcataattactgtgtggttttagggcttaagtaacatgttcgcagtccaggcagtaattcagtttgttagcctggcaatttgagataacttcacctgccaacagaaccctagatgtcattcattctgtcactacattagtattgtcagtaccatgacatcatggcattgctttttccaatctactttccaaaagtagaaagtgattctttctactttttcttatttcttgcaagaaactgcaatagttttacctgcttgtgaaaaaaatatattctttagtttttgatgcaatcatgatgaaaaaaagataatgtatacattttaggttgaaattgtgcttctaaattcctacagaaaaattagataagcctagcaataattttaacaaggattatatacaaaacataggacatttacagtgtttttcatctatttaaacaaactctttgaccaaaaatactgtaatttcatattcctattttgttttacattatgcttttacatctgtatttttgctaaatataatcaaatattgttctccaataactctatatgttatgttatttcaatatggaaagtactgaatcagtacctccagaactgaagctccttcaccaatacatcaaaaggtgtcaataagtgtttgctttctttcttcctattatcaatcaatattccttttaccaatgtgcctgaagtcacacttgtaaataaatgttctctcattctttcctactttcaccttctaggttttttattaatataattttaactaaggatctcttaataaataaataaaagagagtttaaaagcatgagctttgacataaacttggtagaaaatatttgtaagccacgtatctgacaagggcttaaaattcaatatatgagaaactgacatgactcaataacaaaagggtaaataaccctattaaaaaacaggtaaaggacctaaaaagacatttttacaaagaagacatttaaaatatggcccacaagtgtatgaaaaggtgatcgacatcactaatcatcagagaaatacaaatcaaaatcacaataaggtgtcacttcacactgtcagggaggctactgtcaaaaagccaaaagataacaagtattggcaatggcatggagaaaaggtacaccttgtacactgttgttggggatttaagttactataaccattttttttaagtatgaacattcatccaaaatttaaaaatagaaataccacatgattgagcagtctcacttctgggttgactgccaaagaaaataaaatcattatctcaaagaaatgtatgaactccaatgttcttttgcagtattatttataatagccaagatatggaaactacataaaaatttgtcaacatataaatgaataatgaaatgttgcacatatacatgtcttacatataatgaaatattattaagtctttagaaaaaagtaaatcctaccatttgcaataatttgcaagtcaaatttatagtaatagagagtaggaaggaggttacaggacagaagaaagaaaagggtagatattgatcaaagtgcatgaagatagataagatagataagtactacagacctaatgtaaagcatggtgtctatagttagtaataatgtattacatacttgaaatttaccaagggaatagatctcaagtgatctcaccacaaaaaataaaatggtaactgtgagatgatgaatgtattaattagcttgattgtggtaatcatttcacaattagtatgtatatcaaaacatcacattttatacccttaaatacatataatttttgtttgtcaatcatacatcaataaagctgggaaaaaaacttgagttcagatttcagttccaccccttactggctttacaactttggccaaatgcttttttaatactgtttttaaactttctgcgccttaattttctcttttgtaaaatatatatctttaggcatagagtagctatgacatttaagtgagataatgtatatgaaactgtaagcagtgcctgccacatagaaaatgatcagtaaatttctctagtcatgactacaggtataattactggttatgaattcgataaagacaagaacaagatttatattcagatgtgataatgctcttatccaagctagagaaaaaatacaagcaatattatattttacattttccaatttgaacatttaaaatgttacagcaaaagaactaaaaatagaaaccttcacgtgtgaatttttttaaaaagttttaaaggaggtcagcaagtatttgactgaatgggctaatacaagagaccatatgaataaatttttgagtcaaggaccgtgtttgagcatgctcctgaaaaaaaaatgcaggtgcaatacagtctgctatgctgtctctcacctgctgtgaatggatcataatgagtgggcacataaaggtatcagataattataagtcttcaggatctaacttcttattcatctctggcagatgtgttatctgaaagtataatttttatgccacctgcagtgcagcagctgaatatttctggctttagaagtaggaagcttacaattcacactgtactgtgcctgcccccctggggttatagtgaattgaactataacagtcccatgtcaagaataaaatattgtgcagtgaattctttagttttctactttaagttaggtggctgcactaactttaaacatgttgcctcatattcaaaggaggatattttgtagaagaaggacactttagttcataccgaataagtatataaatattatggaaatatgaacactatatttgcttttcattatttttgctaatacaaaattatttgaattccagttctcaaaaggcttttcaattaatgtatctaagattaaaaatcgaatctagttgagagccagtaaaacaagtcatcaaaatgtacattctagttatccagatatctgagttcttaaagactctgaaggttcttaaaaaactaaacttcaaaatttcaagaaaaacctttaaaatgttttccttaaacaaatgttttttaaaaaaaatccctacagcaatgatgtattcacatataaatgctagtctatatgaaagtctcttattttataaaaccagcatagaaaatgattttgtaaatgtgctttgaaatctcaactttttatttttcccaataatcttataaaaacataacaaagtacctataaatcaatggggaaactgcatgttaatttaataagtaagataaatattgaatcctttgttgtcttattttatcagatattttttacttcaaaggtcagcaattcaacatttattccagcagatgcgatcagtaatgtaagccttcaaaagagaaaacaatcaaaaaaggtattttcattatattcccgcatttatatttgaagaggagtgtgtatttacaatgctgtaaaactggtgatattcctcaacgtttctctgtatgtgaatacatcaaaaaagaacctagaattaccagtctccctcattttcagagctattttcagttttatttctatttaaaagacttttgttggtgctgaatctaattttattaagagaactcagaattccttactttctaataaaagattacatgcaatataaaaagaaacaaaatcatgtaagattttcccaaattttggagaactgagaagagagaaactcagagtaaaactacattatctattgtctaattatgcttatgagagcttaaatatttgcaaaaagcaagtttctaaacatatcacagagtcaaagagagttaaaaaccatcttcattacaaaaatggcaaaacagtcaggctcatgtagatggttgttgtaccacggaactcttatttaatctgtttcatgatagtcagttcccatatggttccttaaaactgatcatacttgcttatgcttatttatcaaaactcaaaacctaaatagatgaaaaatatgcttataggacattggtgatgcccacaagtttgagttgcctcccaacagtccagaaacctaatttagaaacttctcatacataaaactaccctttggtcaatgtgattcaaagattcaatgttttttacttcagtagcccacatttaacaaaaaattttagacacctttttcataaaaggtttattctttgctacctaaaagttcttttaattgtactcctgcattaaaacagcatctcatgtaagaataagacagctgacgttttttaaaatttcacagcaaataatcgtatattctttttcctttagtttattaaccattttctatctgttatttcacactgattaaaacagagctaaagataccaaaaaatttaatttaaaaaaaactgtgtggatgtgaaagtagcaaatgtttatgcataggctagagacaaagtagtatgtctcctccctgcagtaaaactccactctctgaacaatgggtctagaaactgtgtatttgtgtacccacacctaagctactgttcaaaaagggtctgtttttacttatgtatgtagctaaactttcacagcattctgagcagaggggcagagagagcctggaattttatattacatttaagcctagagatagtaataaccattattaagtatatttaattattgaacaacgtgagggttaggagaatcaaccatccaacacacttgaaaatgcatgtaaaacttttgacttctcaaaaacttaactaatagcctactgttgactggaaggaagccttgccaccaaattaacatatgttttatatgtaatatatattatacactgtattctcacaataaagtaagctagagaaaagaaaatgttattaagaaaatcataagaaagaaaagatacgtttacagtgccatactgtgtttatcaataccgtaaatttacaccatctttttgtaagatcaatcatctgtctgaaatagtagacaaccacagctgcagacctcaaactaaagtacgtataaaataattcaactttttcttgtaatgtcatgacttttctctgtttgggggagcacttctagcatcactggtagcacttcatatgagtcccatggcgtttttcagcgtttatgatattgcactaaacacaatgggaaatacatgagagcttccagaaatcccttttttctataataggcaatttactggagaggcaaactgctcacttggagatgattagcctcgccttggatatttgcaacactgagctcaccacaatagcaacaaaggtggctatcaaattattatactagtacagaatgtactacagaaaattgtatgaagttatgatttaatatggcatctttatatttatttacatattctcctttatgaaagacagcatgtatattctctaagtatttgtgtgcatacgttttgataaattttaactttttataataggtttgtgtatatcttatggtagtaagtgataaaatagactagtacctacgtctattttatgcattcatgacatatacttttcttaatttggtgatatttctatgctatgcagtttgcaagttttttcaaatctttgttaatctaaaaaaaaatacaatctatgtatttactgaaaaaaatctacatataagtgggtctatgcagttcatattcatgttgctcgaggatcaagtgtatttaccaccaagaacataagggaagtcatattcatacctacccatgaatacattagctgtgcacaaagttaaaaggagatgtgctccagttgtgggagttcacagaagtaagattctgggaagagtccataaaaagcaccaaggttaattttacatgccaacgggccataagcttcctagacatccacttaaattctgttctgggtgtgtctgtgaaggtattttgggatgagattagcatacagcatatgaacgaatcaggagactaaatatttaaaacacatagccctccccaccatgattgtgcctcaacccatcttttgaagaccaaaatagaacaaaaagccagagaaggagaaaatttgctctatcgacctgactgtcttcaagctgggacatcagtcttcttctgctttccaactcagatggaaatttacaccatcagctcgactggttcttaggactcagactggagctctactgtcagctctcctaggtaaggagacccagatccctctcccgtaacacaccccacgacatgtgcagatttcaactgctgctcattgtgctaccctacgggaattggggttcagggagctggtgcaattgccgatactctggccattgccattcctgtgaatgaagagtcccttgcctgacccaggagtctcgtctctcatgtccacatccattaagccgtagttgactaattgttagcttgactgtaaggtaaaatctcagggccttcccagttcttcacaggtactaactagttacttctttctgtaattctctattacattagttagcatgggctagattaagctgtagtaccaaagaatattttaatgcagcatctcatccagccaaattctgcagtggttctaggtgaatctccagagcatctgtcctccacatgtagactctgcctctggctgcttcattctgatgttttctccttataaactgttgctgccaatttatgagaaatagctggctgggaagttgagcttcgaaaaccaaatgctttcccccatgagcgtcatatgtcactccctctcatggtcattggtcaaaggaagttacccaggcacacctagtattaaggagtatgcgagtgccatctccccatgtgcctgaaggtagaggaatgagattaacatatgaatatttcatattcaatggagaagaatatttataaatagtaaaaatggttactaggactcttacattattttttattttacaattttaagctctttaaatttattttaatcaatttttagggtttcttgctttattaagatatgactgataaatacaaattgtatatatttcacatgtacaatgtgctgttttgatatatatatacattgtgaaatgattaccataataaagctaattaacgtatccaccatcacctcatgtagttacaacagtgtgtgtgatgagaacacttaagatctattcttttagtaaatttcaagtctataatacagtattattaactgtagtcattatgttatacattagatctccataatgtatttatcctgcatatctgaaactctgttccctttggtcaacatctcatcatttctcccaccatcacccaccaagttcctggcaaccaacattctatcctctgcttctatgagtttgacttttttagattctaaataaaagctagatggtgcaatatttgtctttttgtgcctgctttatttcacttagcatgatgtcctccaggttcaaccatgttgccagaaaatacaggatttctctctttcttgaggtggaacaatattctattgtgtgaatgcatcacattttctttattcattcactcatcaatggacacttaggttgtttccatgtcttgggtattgtgaataatgctgcagtgaacacagcagtgtagatatctatctgagatactgatttcaaaaagttaaaagtagaacaatttttatcatccagcaatttcactgctgggtatatattcagtggaaaattttaagcttcttgtgggcagaaatggtcttactcttttaaataattctccacaatgccttacacagcataatcacctaagcattcattttactgattaatttttatttaatctaaaaaattaccatctttactgagttataagaggcaggcaataacagctgaaatcagaataatcagtcctttgaattacagccttgaagatgaatgtctaggctatgtaagcagattgttcacagcagagggtgagaaacagagtaagtctctcccatattttggtgtgattgataataagctgaaatactagcagaactagggcttgtctaatggtaactctgctttaaacctagaatttcatttctcatctttaggtcaatgtttcccaaagtgctaagatatgaataggtgttatatggcaaagtaagggcctgtggtcaactaacttcaagaaattctgggattcacaaagctaaagaggtctatttactgcagagcttctcagagcctccaatatgatttatttaaagcactttgtgaattaattgaggaagatatagtacttgctaaagtatatatgtggacatcttagcctatgtcattcccaaaagcagagattgtgtatttgggaaacgatctcagggagcaggtatgaggaaccagaagagtagaaaaaagagataagcaaaaaaataatgataagatttgtattacaaatgtgttgttatgagtaactagtgctagatttatctaggatcttctgagaaggcttaatggaatgagactaagaaatctacaacttggcaagcaaggggcaagcacttatcaattccctccaggcctagggtagcctcacaggtattgtcttccccacattcccagcatttgtgtatgtgagcacagagtgtgttgtcttagaccttccaccctgcattatcaagggagcccagaggatacggtgagagacatgtggacctggcttgaggaaggggtgctgcctggttacacctgtcctcagcctttcagagcatgctcaaaaccagttgctgcagcagcttctgggaaaaaagttgggaccagaatgatttgcagtggtatacaatggtttttaataaaatgccaggcttctcttttcagaaagcattctacaaaattactttggaaaaatctaatgaaagtttcctctactataaaagtagaggaaaaaagctaccatacaagtttaagacataacgaagtacagtatatggctaacaaatgttcttaaatataaaaagatactttaaaattttgttaagaggatagatcttacgttaagtgttcttaacacccacatgcacacacacacacaccaaagggatacatggaaatttggggaggtgttgaatatgccaatttttttattgtcatgaaggtatcagggatatttgcatatgtccaaactcattgaataggacacattaaatatgtttatttatttgtattatttgtaaatatagagagactgaatttatatgtgtgtgtgtgtgtgtgtgtgtgtgtgtgtgtgtagtgtaaccaatacctgcattttttcagaatttttaaatttatttttcaagtaattctaagtatgacctaaaaggtaaaggactcacattctgaagcaaaacaaacctggattagtaataatgagtcttcctagaatttgaaagcaaataaagttgtaaagaaaattctgatttaaattctgagcaacactggctgtaacaaaatgtttatagttattgtaaaatgcctgaaaatctgtttttacaaataatatcttattttctataaaaagctttatatcctcaattcttaggtttttattttataaaggcattcatggaatctaatgagattattattacttccacaagtgtaacatctgtagctcaattaaaagcaagactacagaagcaccattcaacaatacaaacattctcaagttgtgtacacaaggataaacatccattaagtaatcagcttaaaagagaggtgctatgaggcagaaacaagaaaataacaatcaagaaaagcagttttaaaatgagagggaatgataagctagaaaattgacttctaatacaacagggtaggcaatttttttcatacatatatttgaagtccttaccattgattttttctacacctttgaccaaaaaattattttcttaatgtttctaattattttctccaaaatattacattgaaccatagttttcaaaatgaactttgtcattgagtcagtttagaaatgatggaaaatggaataagaccaccattaattatgtgttcctggatggtttaactgttctctttcctcacctgccagatggcaataataatgcttgctacctaagagggctatggaattcccaaatgaatggtgttatgtgaaagcaatatacagttactattctcaagaaagcaggtcaaatactttcctgcaggtagtaatgaagttgtttcctcgtcattgtgtttttatacccatgagtttgaattgagagcttttcatttttttcaagtctaatatcaaatatacttcttactttaacctatgggctaatataccatttgatctaagtctgttttccatatccaaatctattattccacaatatcactgccagtaaacattcagactctaaaattcaagtttcagaaataaattcaactaggtttatcaagaagcaaattttcagtgctgcagactgcattagtgttgttcattataattacaaaatactattgttaaagaaaaattgcacccatcaagatgagcaaacagaaattgttattccaacaccatttccagcaacaagggaaagaacacagaccaactcctaatactcagctctgataaaacaaagggccagaaaggacatgaacagatgcttttcaaaagaagacatacatgctgccaataggcatatggaaatatgttcaacatcactaaccactagagaaatgcaaatcaaaatcacaatgagataccatttcacactagtcagaatggctattattaaaaagtcaagaaacagatgctggtgaggttgtggagaaacgggaatacgtttacactgttggtgggagtgtaaattagtttaaccattgtagaaagcagtgtggtgattcctcaagaagttaaaaacagaactaccattcaacccagcaatctcattactaggtttgtacccaaagaaatataaactgtcttatcataaagacaacaggcacctgtatgtttactatggcactattcactatagtaaggacatggagacaacctaaatgcccatcaatggcagactggaaaagaaactatggtaatattcagcatgggatactatgcagccataaaaaagaatgagatcacgtcctttgcagggacatggattgagctagaggccattatcctaagaaaactaacgcagaaacagaaaaccaaatactatgtgtcctcacttataagggggagctaaatgatgagaacacatggacacaaaaagaggagcaacagacactgggacttacttgaggatggagggtggaaggagggaaaggatcagaaagaaaaaataattattgggtaccaggcttagtacctaggtgacagaataatctgtacatcaaacccccatgacacaagtttacatgtataacaaacttgcacatgtatccctgaacctaaaataaaagttaaatttaaaaaagagctggggtagggggatgttagactttctctgtttgctaattggctttacccaatggaaaagaaactttctcctgtctttatgacaggaggtaattttacaacttgaaataagatgcccatggaagttaagctcctacatttgcaaagaggaggggagatgggattctatcttccctgatgattacatttcaaagggatggttcccaggagctttagaaagactgtcctggattgaaaaactggcaagaggctttttaaaagatttacatctcaaagggaaatagaaaaaaatttaattacaagttttctaaagtgaatggtgaggactagagctaggaagaaacgtgtctaaggtttagtcaagctgcgggcagagcaacgtgaaagctgtcttggtcactgtcaatgtgcaaaacttaagccaattttatctcctgttccccaatagctaataatttagatggaagacaagaaagacaataataatgataaataagttcattatatttgtttagttctgttcagcttacaaagtacttgtggtggatgggaacaagaagtccaaaatgaaatctgaagggacagaaatgatctggggctcacagactctcaaaactagcaccctacagttcctgcccaagacaaagctccaactgagagtcaatccaaggaatgaatgacaaattgagaacagaaacagtagacacaaagaacaaagaatgtccagatgaaactgaaggaggagatagattcaggagttctcatgaagtcccatgtctgttttttaaagagtttataggaacaccagaagggggagcctcagtgcagtaaagttaaaagctcttctgaaccaccattctttttttttttgagacggagtcttgctcagtcaccaggctggagtgcagtggtgtgatctcggctcactacaacctccgtctcccgggttcaaccgattcctctgcctcggcctcccaagtagctgggacttcaggcatgcaccaccatgcccagctaattttttgtattttagtagagacagggtttcatcatgttggccaggatggtctccatctcctgacctcgtgatccgcctgcctcagcctctcaaagtgccgggattacaggcataagccactgcgccctgcccacaatcccattctaaaaatacaggaaattccttccacataaaattgtgcaatagaaaaggataaagataaaattatatattaagttattataataaaacagagaattatgtctcttcacgtattgaaactacaccagaaagataagccttcaaaagagataaacatgaacaggaattttaaaatgaggcaaagacatcagggaccttaagaaatgagtcaagaggtgtaggaataacatacatcagaatagagaaatgcagaggtgaggtgataaatctccggggaaaaaaatataaataaatgtgttaaagcgaactaaatatggtttaagaaggactttatacttctacatttgagtccttgtggacgaatcataatgtagcttaacaggcagaccagattgaaaacctaacttaggttgatttcttttgtctgtaaatttgttctgaccacaggcacccctggagtctctgaatctgctgtgattctggaggctgcctgattcgcaaatcatttctcctttttgtgctcagttaaactccatcaaatttaatttgtcttaagttttcttttaacaaaagaaaaaattttctgaaacaaaaacaataaaggaaaacaaaaatgtaagaataagcacaaaacataatattttaagaaaaataaaagattaaatggagaaaaacatttaaaataaaaaagaaatgaagagatgaaaggttttaatagaaagagacaaagtcaagacaaaaaagattaaccatataacaggatttaccaaaagggggaaaagagcaagcaggaaaacagcacaaatactaaaaactttaaatcaagtaaatgatccatgaataaagaatttgaggtatctatgtgaattcataaactatttcatatttacaaactgaaaagactcagaaataatgattgattcagtagcaacaagcatccctaatttttacattgtgttcttaaaatactatttcccaataaagacaccaacactgtaaaagataaacttgaaacattttgtcataccagatagcaaggacactgcaaaaattattaagattttattaagaagccacagagaggccgggtgcagtggctcacacctgtaatcccaatactttggaaggccaaggcgggcagatcacttgaggtcaggagttcgagaccagcctgcccaacatggtgaaaccctgtctctactaaaaatataaaattagccaggcatggtggtgtgtgcctgtaagcccggctacttgggaggatgaggcattagaattgcttgaacctaggaggtggaggtttcagtgaacccaccttcagtgagtcaaaacacacaaaatatgttaaaaaggtcacttgtggaaaaacacttgctaagaaaacaaccctttgttttgaaaactagtgaggggaaaggaatctggcattaactttgcctttcctattgtaactacacaacattagataaccagagagttaatgaagtgaattttttctttacagaagtattccaactaataaatcaaggagaacttagagaatccagtcatcatcttgtaaccctgatgaattaatggatctagccattgagtctatcagtgactgctagcgtcacaaaaaggaaggcaatcaatcattaagtttctcctgatggaagcaaatgttgccatctatgaagccagtttgccaaataactaagcctgaatctcattaaacttctaggtcaatacgtagaaaaaccagaggacagaggtacatgtaacactacaataggaagaagaaatcaacaaacatatatatatagggacagatggagagaaagaaattgtgagagagaaaataaactaggttttaaaatgcttagatatacatatttttaaaaaactaaattacagtggcatttgtgtggaaaataaacgtaagcaatacattaccaagaagcccaaatagtggttacttttgttgggagtgtcagtggtgaggtttcaccatgctggagggcccatggaaagtatgtgaaatggctggggatgtttaatctcttgacctggatggtggttacaaggatgtacgtcttacagttcattaagctgtgcatttgttttgtgtggttttctgactttatataatatttgactattaagaatattaaaattttctaaaataggtttaggaaataataggttaaacactgttaaataggattctttaatttagttgctcttggggcctcgaaaatgctattgcatattgcaaattgttaaggcagtgaattagcttgcaacatttaacaatctaatttggccaaggaacacttttttcccaagtcagcttttagtagttctcaggacactagtgttccctgaagtacagctcaaggaatgctcctctgtttaatacatcagtgtagaaaattagtatcctgggtcctttaaaaatatatatatatagcatcaaaatagcaattatctaataacaaggacttaatttactaaacactcagtacgaaccattttaaacacttcaggcttgccagtataaggttttacttcaactgagaatattccagttcttaacaggtagtcattgccgtccattggaaataaagttgcaatgactggttttctggcactatccattgctttcttgatcattaaaatagaataatccttttcaataggaacaatgagactatgatttaataggagaatacaaaattaaggtcaacaaaattaaagtctcataattattatagttttataatacattttttgttgtatactgtaaaaatagtacctatgaaaagctcaattaatttatactacttattcctattaattatgttccaccataatgtatcaccatgcaagatgaagatcacaagttttaaaggaaacttgcaagagatgcaggaattcaaactgacctccccatatgcaaccaaaattttctgccaatgtgttgtgtgttccatcaagacagagtacatttaggaggcaagagagtcccagtataagccaaggatgtagtgtagaggagatataaatggacaggaatgctgagagaggtgaggtaatcagtatatgctgagggcactaacgctatgcaatgtggagcagatttaaacgaacagaggccctggggtctaagttaatgctgcttccaggggagaggtttccaacaataaagacaaagaaattattcaaactagttaattttttaaatggggcttacactttttgttcctgttttgcccaaaagataagggcaagtaagcactgggacttttcagtctaagtttgttttccataaaatcaaagtatttgggaaattaattttttatgttagaagaaattaatatgaagaaggtcatgtcaaaacaactccattaaatataaaattagattatgggtacccaagtggtctttcacaccgtttcctactgtgccgcagagtgatagtaggcctctcagtccccttccctcttttaaaaatctccataaaaatgtcccttctctttattataaagagaaattcatacaataaaaattgatataaaagccttattttaaaaatagaattcatctcatccattttaagtttgaaaattaactgtcttcaagctttgctctatcaaagtgcttggggagccaagctaggggattacctatatgagggaaagcttttgggaatgagatctgttagatatattcaggtaactagaccctacatgtaaaactacaaaagtgtgtgaattgtgatgaggtatggcctcattttaccaatttaatattgactactaatacgaggcaaatgctagtgtttgaggttcttttctttctttccacttcaaaaaacagtattagtgagccattaaataaaaactaaagtctacaaaagagatacacaactgtctctaaaccctttactactatgcataattatagcaagtattaagtacattatcaagctaaactaatgcacttgtaactatgactgaaaccgtttcagaagttgttatcatgagttaaatgcattcattcattcatttattcaacacatattgaataatcaatatgtattgattattcaatccatagatcaatagaaaaacaaatggcattattcttgctctctaagaacaagaagtcacgagagaaagtcagaggagtaaagaaacaatcagtattcctttaagcagtgagtgctgcaactgtagaaacacagtggatctaggagtgtccagtgcaggggaatctaactaggactatacaaatgagaggagactcctagagaaagtgtcttctaggttaaaaaggaattgaccaggcaaaaatatgacagaagcactccgtgcaggaaaaatatggacaaatgcttttggcaaaagagagtgggaagtatttgggtaatcggaaaacactaatcagctgaagtccaagtggaagggggttggtagagagaggaaaaagaggtgggcagaagggggcagggctccttgtgatgcttgatgctcatccagagcgccatggggacccccctgaagatttaaatgacagtgagttagtccttttttttttttaactcaaatagccactttacagacccactaactatttgttttaacccaacacatggtttttaagaatgactctagacctatcttgtctcttactgtatactagcaaatggaaagaggcataaatgaacacatttgaagaaaaaaaagaaaatgacaagcttaatagggaagactgatccaacataaagtaagtccattgacacagtaagcatctttttagttggacttagaacattttgttaatactttatttagttatataagcattttgtataatcatttctatcatctctctattccatggatttaactttatttctggctgaatcatgtcctatagttaaaagatatttgagtgtttctttcattacagcataggagcctttaatcccataatcagcataataacgtgatgtttaggtgctactttcaaaattcatctttgcaaagaacatgcagctgaaattttccatggtattaggaaatttaaggtaaatacataatgttctcacaaagtatttcaatttactcaattttccaatttattcatttagagagttcaacttattaatcaataaatggtgcaaataaagccaataacatagcttcaatctcgatatgaatcagtttctccgaattacaaaatttcggattcagtgttataactgcaccataacttcataaaaaaaaaaaactggagaaaattgatgccttaatttaacttatatttctaatgggacattagctctccctgatgagagggcaacagaaacagtgcatcatgtaagcacagggccccagttggctttattttaactgagacatttttaagtggatttggagctaaacctaagaatagaaacacctttaaaaaatataataaggatgagaaattatctctctttctaatatagcagtgattttgtaaaataatttatcaaacttatagactaacttttctaataatcctacagcatttctagaacattggcaaaccatacacaaaagggttgaaatatgttaaaattcaatatatgcattgctattattaatcttctaagcatcaaatttccctaatatctatgtcagtgaacagaataaacatttttcttccaatgactgtacttatagtcatcaaaatattaaacattaattaattaagtcttaaaaatcccactatttgcaaactctgttccaggttaaaaaaaacaaaaaacaaaaaacaaaaacaaaaaaactcaaaaaataaagaagactcagtctctgcccttcagatagctgaagtgacaaacacataagcacagttacagaacaatgtgccctcacaagaggtatgcataggcaatgtgagagcaatgtgtgagggtaatttttgtaccactgtctccatttatgttaagctacataacatttatactataatttacctaatattttaaaatatttaaattacttgctttttatttaaatacattgctttccgaatgaaaagttacttctctactccatcatcatcacttgccaataaaataagtaatcatatgagtaggcagatagacatttataatacacagttttgcatctttgaaatatctcattttctacattttaaaatttgaataaataaataaataaatatgcctccttccttaaatgataagaattaaattcaagatttaacaaacagtaagagaatggaaaatttataaatatttactgctcattggccccacaccagcagtgataaagggcatttgtctatcttgcccctttggataaactcaaatatagaaaaaatgacatgttgtgttgctgtataaccagcagctcatcctggaaacaaacatgaaaggtcaaaacttgcctccctggtcccattttcaggtcttgttcttctgctggttctcctactaggaatggaaaggtaattacccccataagtaaagtacaaaatagccaaaagatagggaaatatttttcatgacaaggacaacctaagcagaagattgctggacaagaaatctcccagctcctccccttttatttaatctttcatgaaatttgttttctttttaaaacattgttcatagaacaattttaatttattaaaaacagaacatcacaaaataatgaactctaacctatttggaaatatacaaatacaaaatgcttatttcagtcctctgttgccatcttccaggaataattaatctataattttttatcttcctagatgtttttctacatttacataaaaacaaatatgtatatttatattatctatacatacatatctatatcaatataggtagatgatatagatacaaatatagatatagatgtatagatatagataatgggaatttatggtcaaaaatagcttctattacttatattcaaagatatctggaagtgcttactgaaaattgtggaaccatttattgagtggaatttgacaaattagaatattaatttaaatttcattaaatgtgtattttgattttaaaatattgctatcttgatcatgcaagtcttcccatctaagatacatggtctaattcaggtcatgttctctgtcctttctgagaattttagaggtttccttatgttaggaactttaacattttcctggggatttcatagttcttgttggttcttcaaatataacttaatttccttttcatattttaaagcttattactggtataaagaaaggactaatatttttatgtatttatcacatagacagcagtattgtaacctcactcactaattttaatagttttaattttttttaattttctaggaatatatacatgtttttaaaagtaaatttctttctttttcctaatagttaatgttgctttgattttcacttaatgaatttggtagcttatctgatccattggtaactaaacgtaaatgaaaaaatctacgcaatttctttaaacatatgacatggattttcaatactgcctggcaatcccatttcatttcttcagttcgtctctccccagtctttcagatgattattgcatgcagacatatctattctccaacatctcacctttctaatttttaagtgataactttgagtcatattttaataagaaaataggaatatttcataagatatttataaaatatctacaaaatatcgaatatttataaaaatctgaacatttataaaatatccaccaaagctcttccagctatccccaaacattactgtgtccacttttcttcccatcaccttttttttttctttttttgagacagagtctcgctctgttgccaggctggagcgcagtggcacgatcttggctcactgcaaccttgcaacctttgcctctcaggttcaagctattctcctgcctcagcctcccgagtagctgggactacaggcgtgtgccaccaagcccagataatgtttgttttttgttttgttttgttttgtttttgtatttttagtagagatggggtttcaccatgttggccaggatggtctcgatctctgcccacctcagcctcctaaagtgctaggattacagatgtgaaccaccgtgctcggcccccattctctcttaaaactactctaatcaggatttcatccctactgctgcatgaaaccgctctcatcaagaatatccaaacctccctggtttactttaaatacttcttaatcctcacctttcttgaccctcagcagcatcgtatgcagttgaatgctccctcctcttggcccattgtctccgcttggtgtcagacacgccactctcagcactctttccttctacttgcctgtcttttccttctcagtcttctttgctagccctttgtcttctccctgtcctctaaatattggtgtatcccagagctcagtctacatccctctctctcctcttccctacacactctcattttccagatagtctcatgtagtccttggctttaaaatacctacatttatatcttcaatcccaaatttgcctctgagatgccgaatcatatgtacaattgcctgctctgcatttaagatggatacctaattgataactaactataagctgtccaaaacaggattccagatttgaccctcttcccaatcacagatatatgtctgtgttgtaaagatagatagataaatacgcaacgcacacaaagtctgaccactcttaccacaaccatctctacttttccacaataacccccagtggatctccttgcttctactcttccctttctatagcagccagtgtgatcttttaaaaatacaaataaaattatattatgtccccagactgcccttcccgttaaacataaaataaaatccaaagccttcttatggcccgtaatgatccacatgtacctttctcccaccctgtacctcattaagctcattccctacctctcttgctcacagtgaagactacactggctttgttgctatttctagacaaataaagatcactccaagttctgggcctctgtgctcaccatctctctgtcttgaaaatacttcccccaattatattcatggctcactccctcgctttggttgggtctatatacttaattgtcacatcaaagaggaggcccttctggccatgctttctaaagtacattcccctcactatcattctgtgttacttttcatcatggcccttatcacttccataaggcactcattattatcttattatcatctctctctttattagaatacaggttccctgaaaacacaaatttcccgtcttggtcaccatcatattcttatcaccaagaacactaaatggcagatagtagtcaatcaataaatgagtgttcagtgatgagaaagtgtttaaaactaagttgaataaaattggtaatacaaaaattgataataccactactatttctgtctttagttaactcccatacaatttcccttgctgggttttgttttattcctatttaattcatttagagtattattagtaatagtctccttgcttctattctgttaagtttcctgaaatactcttgcagcccctatttataggataaaattagttttctcctttaccttcacatttaaatatattggaaatttttgttatatcacccttatattgtaggagtaaattgttcttgtccataaatatttatctttatggcatctggctttattgctaatttaccaattgatatcattttcttcttaaccctcttcaagagagctattaaatgtggcaataaaatgatatggtttggctgtgtccccacccaaatctcatcttgaattatagttcccataatccccacatgtcataagagagacccagtgggaggtaatagaatcatgggggtggttacccccatgctgttctcctgatagtcaaagagttctcatgagatctgatagttttataagaggcttttcccccttttgctcggcacttccccttgctgccaccatgtgaggaagggcatgtttgcctccccttccaccacgattataagtttcctgaggccttcccaaccatgctgaactgtgagtcaattagacctctttcctttataaattactgagtctcaggtatgtctttattagcggcatgagaacagactaatacattacaacatcctatttcttaggagtttgcccaggagagtgttgattcttaggcactttatgtatttcagtaaaactaatttattaaataggtaattttaaaatatctgaactaatatctatatattgaatatataatctaaaaatagctacttttctaaattggccatataaataacttcatctaacagacaatagtctttctaggtcacatgatctgatttgggattcgaaaaaacaatgtcagatattgcaactatatcatggcagccagtgaacaaagttcacattccatgcttcttgtatttggacagagctcaaactacataactgagacctcagagctgagatataccaaagaccatagatttcagtccagattaacatgttctgctcaagcatcctcatgatttaaggattatttttatattacaaaagaccccatttttctttagcaaacataccataagtcatgtttaaagaaaggtacatagagctaggtggatgtttacaagagccctttgagttaaatccaaaattattagcctttctgctgtatgcttataaatgaagcatagcacaacataatagctagattgaccacaattaggtccctgaattaaaggcaagaaataagacattttgacagctctggaacattgcatttcatggggttcagtgcacagctaggtaacacaggtcttcctgtaattgcagtacaatgggaaaattcagtgcttaattgccttcagattttctcatgtgatggatataaaaatcaagtgccagcattgtctccctgccattaagtgaaacacaactaaaaacattttggagtttaactgtcctaaaccagaataagagtacatgttgggcttctttctcaggcatagtttctgtaactatatacctgttttttcacaaatatagaaaaaaatactttaagagtcctggttgacaaaatgcttttaaaaatattttaagagccctggcttacgtcatcagtaatatcctccctttctcatattaaaacagtgcatccaaagtctgccatttccttagcaaggctgggaaaataatctttaacaatgtgccaagatgaaaagaagtgtggttatttttgttacttctttcaccagaagaaaaaggagaagaaagaggaggaggatgaaaatgaggaggagtaggaaaatgctgcattttgtagcaaattgtaaatgttatatttacaaaccacatatcactttatattccgggatagagagcagttgtcgctgagggatttctggaaatatgggctaaatcccaagagtggctctggaaaatactgggaagacagcagatgaaaattactactgtgaggagaatgtaaatgacactgtgaaaatgccagatgtagacagacatatcctctactgaagagcatctgcctggggagaagacagggagcttcatttgagcacagtgaggcagctataagcactcatagccacttctccttccagctggccttactgagaaaaactcaagactgaactccactgaaccatctgcatccacccaaatgaatagcaggaagactaactccatgcaggagcccctgggctttcatggtccacattcataaatcccaaggattcagagcagcattctttaatgtaatggagaaaatactattctcaaacatactcaacaataatgttgtaaaacatatggctaatgaatgcattgtcctgattatctacaggaacttgtaagactgttcttcaggtagccttggacagacccagttctccccattttctcacttgcagttctcaagaataaccatagaatgtgcaaggaatgcaacatcttgaggtagaaaggaactggccagaacatcctgggctctgttccagtcccctacccttgaacaggatgtccttcgatgccttatcacagcaagtcacgtgaccctgaagtgtataatcctgcaaagggagcttttcaggcttcctcatgtgcaatgcaagcagggcatatgtactcaagactccacccatcccaggcagctttcctgagccttgagcgactgactctcaatgagtccttggtttctgttatcccttgctgcccatctgtaagtaataaactggcttcatgcatcttgttgcatataagaacgttttgtctcactggactcgaacaagttgttagccagtgcacagtggacctgcttcacagaatgcgaagagtccaaggcttgggggtgatgtttaggttgtaacaaagccacaaagcacaggtgattgtccatggcaataaagactatgtcttaacattttacagctgttacagacataaattggaagagaatctatatctgaccctttaaggggcacctatgtgaagtcatttgctgctgagggcagctttatactttaaccaaaaagtcaaagaaaattcatcatttccttttgatttctggagccaacatcgttctcctactcagatgctcttcccagaagacatcatctgtaacttgtgatctgtgaactgtacgtgacaggcaaactgaattctctttagaattatctcttttcagacgggaagatcagtaatgaccaaatgagtaccggtttgttgcaagaagcaccctgctacctcaccctaatgattaaatttgtaatttttccttgtctgtggccactaactattcataattctgaaccatatttttagaataatttctatagtggaattattttattgccagttgttgttttgttgattttggcccacagaagcagatcatagtggaagagagaatgccacctgaggcaggacccagtccaagacaaactagaatgtttacttaagacctggcataaactagaatgtttacttaaaacactccattattttttgtttgttttttgtttgtttttgagattgagtctcaccctgtcaagaaacgacagatgctggcaaggttgaggagaaataggaaagcttttacactgttggtgggagtgtaaattagttcaaccattgtggaagacaatgtggtgattcctcaaagatttagaaccagaaataccacttgacccagcaatcccattattgggtatatatccaaaggaatataaatcattccattataaagacacatgcacgcatatgttcattgcagcactactcacaatagcaaagacatggaatcaatccaaatgcccatcagtgatagactggataaagaaaatatggtacatatacacaatggaatactatgcagccataaaaaggaccaagatcatgtcttttgcagggacatggatgaagctagaagccactatcctcagcaaactaacacaggaacagaaagccgaacaccacatgttctcacttataagtgggagctgaacaatgagaacatatggacacaaggaggggaacaccacacactggggcctatcagggaagcagggataaaagcattagagaaaagaatgaaatgcatgctgggcttaatacctaggtgatgagttgataggtgcagcaaaccaccatgccacatgtttacctgcgtaacaaacctgcacatcttgtacatgtacccccgaactttaaaaaagtaaagtaaaataaaataaaacactccattagcatggaattcaacaagctgaggattttcaagagacaattataatacaaaagagatggaaaagctatgttgtatctctactgttcagtaatcaccagaggcacccaaagacagaagctgatccctcactatgacgcttaaaatggtccacaactcaaccctctagtcactcctgacatgaacattagccagaccagtctttgcacaattcctcaagttcccctgtggtaggatggcaactacttattccccactcctgattttgccttccacatgaagggaacttttctagctacaagaagcctagcctttcctcacccttttactcattccgtttccttacaataaggaataatgtattgattgctgagattagaaggagtaatcagtgagccacagtccagctcctttctgctacctgcagaacacatactttttcctcttttatcccataccttaaatttcaaagggccctgcccctatgtgaagtggtagtggagtggactgggatggagtgggaacacttatctttgctgactcatttggggattttagttttagaaaacccttgaccacacaagggacattttgttcctctgtgccttactgctgtcttacttttcagttgggtcagaacacacagaagaagtagggatgctattttgaggtcacctcaaagaccacaggactatatttgttcacaacttcttgttccaggagtttctgccatctggaaggtacttcctcattcttttcaccttttccaaatgtatgcaccattcaagctatttttcaagtcttaacttcaaccacaaaatgttccacaaagcagctgtgatatttaaataatgtaatatgtgtgaaagcattgtgtctggggcagtaggtatatactaggtgtgacttttctttttccttcttagtcactcaagtctatgttaatcttcaccatacactgctggtttgagtaccaagaggtgcaaatatctagaaatcagtgagatgttatatctaaagagccataaaattaaccatgccctttgagccaaagttccacttctgagaatgtatgctgacttaaagctgaaactggcaaatatttataccccaagatatatgttatattgtgatcaataagaatgactaagtaaattgtggcatcgacatataatggattatttcgcaacatttaagattacactagcaagtttctaaagataacacaaagtatttctatacttctgcatgatcttacctcagtggtaatcattccctctcctgaaaaataataagagctttatttttcactctcttttctgtgtcattcttcaacattatactttaagaggattttttcactattttctatcatgataatcatcatcgttatcatctgaaaacacaaaaccatatgtgctgattttacaggtgttgcagtatgaggatattctctggaagtttacaatacaaaatatgcaaccacatcacacagtaaaaactcaatatgtattcgtgaagtagttgagtgaatgacctggactaatgtatgtattaataataaaggtacaggtatcaagttcatatgtatgtactacctgagtaaataaatgaatgattagtgaatcatctctactgtctaattatatatcaatcattcattttgtttttcactttattccaggagatgctaattgcctgtccatttccccagtacttctcatatgttcatttttgaaacaggaaataaccactcacgatgccctcggcaacattgactctaaagtatgaaatagaacacaatttcaaaatgaagcacgatgccctcggcaacattgactctaaagtatgaaatagaacacaatttcaaaatgaagcaggcaattaggaaagtaccaggttatgaccataaataacattcattctcccacttcagtatagctgcaccacaccattaatatacacaaagtgcaaaaagtgttctctccttattgcttcctgcaattggatctgatggatcatttaccttcaaaaactttatgtaagtctgttctcaagtcaaggttttagataaccagtttttttctttttttagacagagttcacatagacaaaataatcgcccccaagtagctaagtctcagatgtattatgagacagatattaagaaactaacgtataagtattaaaatactgaataagtgaatcaaatttgccatgaatctccctgtttaaaaaatgtcaacacttttatgattcactttaactgtagtggtatcaagttggcattcctcttagatgctcttactcctctctcatattactgtaagtgactgatgatatgtatcaagaatcagaccatgttgttaaaaacacacacacaagtacgataataaattttatctttttgtaactgtgaaatactattttttaatctttttttgttttttgttttttgttttgagacagagtcttgctctgttccctaggctggagtgcaatggcatagtcttggctccctgcaacctccgcctcctgggtctattttttaatcttacttgaacctcgttatgttattaacctccctttcaaatctaagaaagtatctttaaaatggtatattgaccatgaacaatatgcaaatgctaaggcctatatgatgttgtctggagtcccctgctgtcatgcagatgtcacagtgattggcttcctgctcccaggtcagatttgctctaccctgaggctaatctgtccttgttacttcacacactgtcctgtgtagaaccacattcttcattaacatctaatttcctagaaaattttttttccgataaagagcacttcctggaagatcggggcacccgaatgagccggcattttctacatcttcagggctttgtaaagcttaagataactgacaaatagccttaaatgtttgttgctgaattacaagaaaatttagtgtgcatgaagaacggtttccagattttaatccatgcattaatccattaaaacaccttcgacttctgaggcccctttaaaatatgaggagctgactgagaattgtgaattgcatgcatattctaaactttaaaaaagctattgacaagattttcttggtggataatttttccatgactgcatcattctttccaaagcagaaacatgtttaggttagcatttttaatactaagtattagaccctgaacattttatttgtaccatttatatggtattctggacttactgtgtctttgaggaatttgtgcttcaagaagagtgggctgaaacagaaaaatatcaccttcgaaataagactgatactaaccaaattcatggaaggatatgtaagccagatgccaacttgatcatttgcattgagaatttcaactactaaggaaagcaaattctcatatccactatgtagtatattgtttacctgtgtgcataaatatctaccctgaaagacaaactgttatcaaaagattgcttggtgagtatggacacagagaaattagaatgagctgtgtgatctttatgttgatttcctcaggcattgaccaccaaatgtaacttttcataggcagattcttgggtttttgagtcagagtcttctttctgactcaaatattagaggcatactgaaaagttattattgtgttttactttcaaaatcagttctcgattttctttcaaatagagaataatgcaatgtattaaattttgggtatttttaatttgttggtttggttgaggtttaatttttatagatcttctcagactaaatacattcttgatgtaccttgaaacactgtatctttttattagtaattattttggaatttttctatagatggttgaatttttgtattgtatcagtagttcttaattgattttatatctcagatacccttgaagatataataaaattacagatcattttcccagaaaaacaaatatagtaaatgcatacaaaattttgcatactccttaagtgtttgatagggatacaaaagttaattcatgtactgcacatttgtcgaacttgagctactttatctgtccagaccatatcatacttatacttcctattttcagaatgagacaaaattttagagacacaaaaaggcaaacatgcaactcaacttttacataatttgccaaatgcagtgccaggccaatgcctggatgtcatctgaaggcagcagattcggtcagagaaggtgccaggcctaagctgcagagctggctttgaggatgggggtgagcaagcaacagaggattttatctgcaattggtcttaatcctctgaataaagcataagttttggtcttgataactcatgtaccttagggatctatggaccaggaagggcagatttcactcaattttatataaaaatagaagcaaacagatgtaatctccaaacagagttcctattaaagacagtcagtagacagtatatgttctctttccctgttgtagtaatacagcctgtttttggaaagaacacaaaaaacttgattcactttgtttaggaaaaataagcaatagttacatcccattttcttcccagaaaatggtggtttcagtcctaggagatattctaaggtcttcacaatagctgctacttttcttaatttcacacagagtaggcataatttcaagtttgggaaataccttattgtcatccttatccttcattttactctttattaaaaaaacagtaatatgtacatatggtgtgttatttccaaatggataaaataatagctctcagatgcttcatataattcaatgaagtaataataaaatatatatttctcttaaatagaacaacacaagccttggtgatgatcatggtgtatagggcaatgagacagattggtaggttatttgtaaatgctttttagagggcattatgctgggtttctctgcctccatatttcccatcacagtatcttatttgtagatttgtgtattgatttatactggagtgtattttatcatttgtgtctacatctgaccatctgtttgcctgctaattctgtagccattctttctttcacagggtcagaaagctatatatactccttccatttcacatttttactgagtcgggcttgttatcttttaaaatttgatttgcttttcttcctttttttttttttttgttaagacagcgtctcattctgtcactcgggctggcttgcagtgtggcatgatcttggctcactgcagcctcgacctcctgggctcaagggaacccctcatctcagcctcctgagtagcagagactacagtcatgcagcaccacagccagctaattttttttcggtagagacagggtctcactaggttgcccatgctggtctcgaactcccaggatcaagcaatcctcccatcttggcctcccaaagtgctaggattacaggcgagagccaccatgctcagtctttcttctcttccttttaacctagtagacctagcatcctttaggattctggtattattaaagcattaattactttttgttcaggagttgtagagaattctgttcacttttatgtttgcttgtctacatttctattagattgaactacaggaaattgccattttttggtaaaatatggtcaaatgttggcaatttaagatggctcacctataatttgttatgtagacttgaaaaaaaattggagaactttgtgagacaaatgtcggcaaaatgcttaacacataagggctttttacatgctatgtattatcactattatataaaacaattcagtgctatctataaaaagaatctgatgtatgacagctattctcaagtgtgtttgtgcaatgctcaagtagccactttatagtgagacctctggggatgcaattttaacattccatagtcattttaaattcatttttaaattgccaggtttggctgtttttcaactttggcctacttgttctattttatctatacatagctgtattcacaaaccgttatcctctttacaataacatcctgcaggagcatataagtccttaagagcaaaagatagaagaaaatgtaaagatctagacatgttaagtgttttaaaatatcatgctgcaaacgtatcaaatattttagtttatcattatttctgttcaaattgtgtggatcaaatccaaaggctaaatcctcttcaaatcccttttgaactatccccatgttcttaacctatctcaatgtcattacgatttttttaagaaaaataagtctcaaagaaaaatacagagaaggagcagaataactggttttgtcactggactcatgatcatttctcccattatgatcagtttcaggccttaagttcaagaccagtatttatgttgggagttgatttaggcaaattttcattcaaaggataaactaatttaagagccaaacaaagggtttgctaaattaattgctaactcatttttctaaatttgaagcttcaatgattgcttctgttaatgcaacattgtcctagagtatgggcagcttttgtagcactcttgtcattgccataattaattcttacttggagcaagtacaacattcatcacattttagatggtgctccagcatactgtgtcagaacagaaggaaggcggtgattgacaaaatgtttatgtgacagatacattcaccatataaatacacatctgatgaactcgaaaattagcttgctgtttggaacagtcatgcatattttaaagaccaacttcacagaaatgctattttccacggctcatttcagctaaaaagagtagtaacataatgctcatatgccaaaacaaaacgacttattttattcagccatttcaaacaactgatggcaggaaatagcaggaaacttaaggccaggccacttaaattcccgtaagaggcaaggagtgctttttttttcaattaaggagaaagccaaacatttttgtccaatactaatattctttggcaatttttactgaatcttagaggttactttttgtcattttaaatatgcatacttatttttgacttagtcttcagaattagtgatgcacacacacagtaattagttgagctctatctccagttcacctgctccttagtttccagtcataaattttgtctcttctctctactttcccattacacttcccaaaggctggctccactcttttctgctaccttatgcaatgctaagctcttctgctccttaatcctggttaccaattaactactgctgtgtaacaaacaatctcagcaataagtggtttaaaataatagccactgttgtttaagaatctataggtcggctgggtggttctgcttatgtttgtacaggtcagctggggcctggctgttctaatatatcttcactcttatgtcaggtgaatgattgaggcaacaggagtgacaggacctcatgactcttggcatccagaaggctggtgtgggctctttctcatagcagctaggaagagagggaacagaagcttgaaaggctgcctgaggcctagacctagaattggaccagtgcaattctgccacattcttttaaacaaagcaagttacaaggctagcctaaatccaagaaggaaaatagacttcacctcttgacagaagaagctgcaatgtcacactgcaaagtgcatgataaataagaactgaactagaaacttctgtaatcactcaatcacattcctccaccattattccaaaaatatttgctctacacttcttttcaatgtccataccctgatgaagccaaatgaagtttgttgaccaacttacttacaacttacaaccagcagagaaagccaggttagaatccaaagtcaagaagcaagacaaaagagagagattgtcataattcccagtttattatttgtgtcttcagtgtcaacaagaccaaaataaagcttctccacgctaccagctttgaaatgagaattctgttccctttatgtttgcttgtctatacttctattagattgaactacatgaaattgccatttttttggtaaaatatggtcaaatgttggcaatttaagatgtcttacctgtaatttgtaaagtagacttgaaaaaaatgtagacttgaaaaaaaatcatactttgattctttgggaaatgatgggaagtttttagaataaccatacacagacatttttaaataaaagcaatttcttttttaaaaaatccttctagtttttaaaggattcattggctcatggaattgaacataaatggaagtttcatgtggagaggaaaatacagcatggattttgacatgacacaaaactaaattcaaatttcacttctgcaaaatttaataccatgtgactttgacctaattggccactccagccttacttctcacctgccttacggactcattatgagaaaaaaacatgttgtattacatgaaagtcaatacacatggcaaatgttaatcatatttttatttatttaatgcattactttacactctcacagaaatgacagatgaaggggacagggcaaacccaggaaaacttagcccagagctcttccacctaacagggagtcttagaactatactttatgctttttaagaaaaataactcacttactaaaaatagaattttgaagttaacattcttcttcaaaattatcaaatacatttaaaaagttccattaagtaatatcacttctccgaacatgtttgcatgcatgaactcttgaagcattttctttgattcaactacattctttaatataccacaagaatatgtacaacaaaaatactgcttcaatcaaacctgtctgataaataaatagtttgtatatttgcatttgttaggatatctgctagtcatagactcctgaaacctttgataagccatgaaaaaagtgtactgacaactcaacatatgtggtcaaaataaataaataagcaatgctttagtttttctagaagattgttttgttacatgggagaagaaaatgaatccctacaccacttaaaagaaagtctgcttgcatcttcaaaactcaaaaggaaagaaacaaatcattgttttacaaagttgaaaggcatcttttaccatttcacagaaatctcaaacattcacatccctagagtcccaggtaatgtcatgtagttcatatgtattttgaggtggttatatactttattcataagattcttttatttatttcaaagaatttatttgtacattgtttaccttctttgccaagttcagtgatacactgtgatgccttttcttggtgggcagaggaaaaaatgcatttctggagaaattgtggtttagagctagttttcagggtggcagcccccaagaggaaaattgactagaaaggatcaacaatctttaattctatcacaagtttaatcttgtaatgaaacctgaaaatttcatttttgttaatagagaaccagcatgaaatgtagtgaacaaaccatttccactggctgctaacacagccacactgagtcatcacagactcagcataaaaaaattgatttaattatattgaagagaaagggatggggatagactgaatcagcacagtcagccaaatgcaaacaaggcacacaactcaaaattgctgtggggaatgcaatatgctttaagtgtggagctgaagtgttcatctctgactgttccattcttaggaacatctctgactgttccattctaataggtagcaattccagttgtactgaaaagcagctctcccttgcgagatatctgacccatttttccaatgatttctctgcagcagagccataatttaccaacaaataagccaattaagccaattaagtggtgtgttcactcctttgggtcacttcctaatgactctaaaaacccatttgctatgatccgaatgtttttgtgcgcccaaaattcatatgttgaaaccctaattcccaaggtgactgtattaagatgtggggcctttggaggtgaatatcatgaggtattcatgagatatcatgatatatatcatgagaatagagccctcatgaattaaattagttcccttatgaaagagacccagtgaagcttatttgccccttctaccatgtgagaacacactaagaagacgccatgtatgaatcaggagatgggcccttccagacactgaacctacaagcaccttgattttggacttcccagcctacaaaactgtgagaaataaatttctgttgttcatgagttatccagtttatggtatttttctatagcagtccaaatggactaaagcatcattcttgtgaattaatctaaaacacccttcacttgtaatctccaggaacattgcccaaatacacatggagtctactctgatctgttttcactagggatcatgtcattatcaaattgtaaaaaaacaattacccatatataaatatatagacatattatatatttatatataggtatatatacatacacatatacatacagatatatcgagatatagatatatctgtgaataaataagctttacttcaagcagaaaggcagcatgtccagccccaggacctaagatagccctcatggacttagcctctaggcaagagcccacacatctaacctcctggctggccccagtggatccaggcttgaggctagtccccatgcactatggctgcagaggacccagggtccaggctcgtccctgtagaccacagtgccaagttggctcccatgaaatgaggctccagaatcacctctgcagacctaggctccagaatagcccccatggattcaggacccaaatctatccccatggactcaggttcccggccacctagcactgggacagttcccatggactcagcctctaaacctattctagtgaacccaggtgccatgctcatctcagtgtctggctggcccttgcagactcaggctcaaggactaccctagtgccagttcaagcaatgtggacccaggtttcaggccagcccccatggatacagactccaccaccagccctgggaacccagtcaacaagtccaacctagtgaaatcaaactccagatccaccccaatgaacacaggtggcaggcctgtctatctgctaacccaggtatcagtccagcctgcccaaggactagcagactcaagcctgcctacaacatgccttgtgaagggcttcccctaacaaagccagtctgcaaagattgaaataagtctctacttcttcaaatgtacagacttcataagacaataagaaacataaaaaacacaacaacaacaacaacaaacactgccaaaataacatcataatcttccagtagctgatccccaaagaaatggggatataaatactgcctgacaaagaacttaaaataatgttttaaagaatttcagtgacctttaagaaaatacagagaaataatttaataaacttagcaataaaataaatgaccaaagtgaggaactttcaaaagaaattaaaattattttaaaaatcaaacagaaattctggaggtgaaaaatacaatgagtgaaatgaaaattacaatagagatcatcaatagcagaactggtcaagcaggagaaataaactctaaactagaagacagtatatttaaaatatagtcaaaaaaagaaaaaaggaatgaagaaaacttcttggatttatgaaacagcatcaaaagcggaaatatttgagagatagaagtttgtgaagaagacaaagcagagataaatagaagaaagcttatttaaagaaataatagcataaactttccaaatatgggaagcatatacatatccaactatagaaaattcaaaagtcttctatcagattaattccaaacaggaatacacaaacatatattataatcaaactgtcaaatatcaaagacaaggagaggaacctgaatacagtaagagaaaaaaagcaaatgacatataaggagttccaataaggccagtgatatatatatatgtgtgtatatatatatatatatatagctgaaggaagaaaaacgccaaccaacaccaactgtaaggcacctggcaaagctgttcttgagaaatgcagtgacacacattttcccaaatgaacaaaaacaaagagttcatcaccaccagacctgtcttataagaaatactaaagagatttcttcaggctgaaaggaaaggacacttagaaacatgaaaatatattaaagtataaaaatcactactaaaaataagtacatggtcaaattaagaatattcaaatactgtgatggtagggtataaattacatgtctttattgtgaaggtcaaaagacaaaactatttaaaataaaaataactacaataatttgttaaggaatacacaatgcaaaaagaggtaaattttgaatcaaaacatttaatgcagggagattgagtaaaaatgtaatattattttatacaatcaacattcagatgttaagattatcagcttaaaatagcctgttataactatgttttatgtaagtttcatgataaccacaaatgaaatattaaaggccgtatttggcaaactcacagctaacatcatactcaatggtgaaaagctaaacgttttttctttaagattgggaacaaggcaagaatgcccacttatcatttctattcaacatagtactggaagtcctagccagagcaattagacaagtgacagaaataaagggcatccaaattggaaagggagaagttaaattgtccctgttcgcaaatgaccataatcttatatgtggaaagccctaaagattgcaccaaataactgtgagaactaaaatatgcattcaataaagttgcaggatacaaaatcaacttacaaaaatcagtagtgtttctatatattcacaatgaactatccaaaaacaagaaaacaaactcatttacaatagataggaagaaataaaaaataaaatactcaggaataaatttaaagaggtgaaagacctctgaaggaaaactatgaaactattaaattataaactaataaactataaaactaaaaactgttgatgaaagaaattgaagaagatgcaaataaatggaaaaatattgcatatttacagattggaataattaatattgttaaatgttcatactactcaaaacaatctacagatttaacacaattcctatcaaaattccaatgacatttttcacagaagtacaaaaaaacttctaaaattcatatgtaaccagaaatgacccagaatacccaaagcaatcttaagcaaaaagaacaaagtttaatgcatcacactgcctgatttcaaaatatactacaaagccatatttatcaaaacaacagggtactggtataaaaacagaaacatctgttaataaaacagaatggagagcctggaaatatgtccttacatttatagtcaactgatttttgacaaagttaccaagaacacacaataagtaaagaatagcttctcttcagtaattggtgctgggaaaactggttatctatacgtagaaggatgaaattagatccttatgcaaaaatcaactcaacatatttttaaaaatctactcaaaatggattaaagacttaaaactggaaactataaaactactagaagaaaccatagaggaaaagctccatgactttggtctgagtgctgatatttttttaatacatccccttttaaaagcacaggcaacaaaagtgaaaatagacaaatgggaaaatatcaaactaaaaacttatacagctaaggaaataaacaacagagtgaagagacaacctatggaatgggagaaaataactgcaaactgtgtatctgataattacatccaatgtatataaggaactcaaacaactcaatagcgagaaaacaatctgattttaaaatgggcaaagaacctgaatagacatttttcaaaagagagcatgcaaatggccaacagatagatgaaaaagtgttcaacatcactattcatcagagaaatgcaaatcaaaatcacagtgaaatatcgcgtcaacctacttagaatggctattatcaaaaagatgaaagacaagtgttgacaaagatgtggagaaacagaaatcactgcacactgttggtgagactgtaaataaatagagctattacagaaaacaatacaaagctcctcaaaaacttaaaaatagaaccaccatatgattcagcaaccccgctactgaatgtatatccaaaagaagtgaagttagtatgccaaagagatatctgcactcccatgtttatttcagtgctgttcacaatagcccaaatacagaatcaacataagggtccaataaatagataaagaatatatggtatatatacataatgaaatactctttagttgtttttaaaaaaaggaaatcctgtcatttgcaataacatggataaacctaaaggatattatgttaagtgaaataagccaggcacagaaagacaaatacggcatgatctcacttatgtagaatctaaaaaagttgaactcatagaagcagaggttaggggatcatattggccaaaggatacaaaatgtcagttaggtaagaagaataagttcaagatctattgaacaacacggtgactatagttaataatgtattgtattcttgaaaagcacaaagagagtggattttaagtgttctcaacaaaaaacatatgtgaggtaatacatatgttattagctcaatttagccattccacagtgtatacatatttcaaaacatcattctgtacaaaagtatttttatttgtccattttaaaaataaataaaatatgtaagaggaaaaaaaagaaagaaagcatggcgaagactggactacagtcaggaaacctataattttgttcagctacctgttgactagctcaggttataagctttctgagtgatctttctatacctacagttttcacttgtaagaagtcacaggattggctgagattactgacaaagcccctcacaggtctaaagttttgtgatctaaagttgtttaccaggaatctacaaattgcctaaagccatggtctgtataaactaaagcaaagcctacatttttaagttatatttttataacagtagtttataaatataaataagagtacaggcaaaaatacatggctatatccaatattctattcaagatccctgcagcaatttgttttataaaaaattacatcttcacaaaaatatcttcaaagatattccactgagagttcatactttttctcaccctttaaatgtactagaatcagcaaagacatatgaaaatcgatcagtattcttttcatcctctcctagtttatatattttgattttttttcttacttgttgatgtcctgtgtgaacatcagcattattaccttaacttatccttggacttccatggaattaatgaactgttgcaatagccaatcataatttgtgtttatggtttagcattctgtctggcttataattatttttagtacagatctgctagttcagtaaatgctttcattattcttagagctgaagaagcttttggttatgcagagcttgtcttgtccctgcaccttacttcttggccaccgcttgtagtaaacatcgtttttgctccattttaatagagctgcctgcagaaggtcatttattaggtaatcacttgtctgtgaaaaattctaattactctatgtttgtcaaagggaggaaaatagcattggatgtgaatgctgaatgagaagcaaaccagaatgcagataagggaatcagaagttttttaaattggtagataaaaagatgtgttaagtgcacctacattttgagggttaaaaagaaaagatacactatcagctataataaagataaaaaagcatagagtttatggtgttatcaatttggagttaaagcaaaagaaaaatcgtttatgaagggtacagggatgtttttcctgtggaatcttagtgccccctgctgatcctcaaaaaatgttttacatttacattggtttctgatttcttcccacatgggtattttcctattacgatacttccttttcaggaaatatttttcctatgtgactcgctatctcagtaatactatcacacattagtatctgtagctcctcatagaaaaaaaaagtgattcatcaaaaatgcatatccataaactttaaaagagtgcaaagagtttgaaattactacttgtattataactgaaatggttgaacttttaattaaaaagaaagaaatcatcaccacaaagaaagaaaataaaagcgaaaatacatggtgacattatcaatgacccagactggagtactgtttctgagttggatgcttgttgaatcagttccttgtttatgacttgcttcagtttataactagacacagacacatcagacatcaagacacaacacattgccaaagaccacccattagtaatatcaattttttcacattttagtctcctctcatacactatctgtgagagaaatactattattctcatctgaggagtgggaaaaatgagactcataaaacttatataattatcgaaaggttgtgaaccattgatggcagatcatcatcttagattatttttagaacacaagggaatataaaagcattttccatgcccactcctcactccactccagattatttcagagcaaatcacagacatttataaatatttcagtatgtgtctctaaatataaggtctcttttaaaaagcattttcaaaaatctagcaaaaccgagatatttagctatgatttcaatgtccacactctcttcatcaattaaccatttcttttattttctgatgctttgatatctgcttgccttgctgaccctacaaggacgactccttccttccaggattagccaattcctggagatggtaaacaactcatctttcaaaagtgagcacaatttttaaatgaaaaccaaatcactccatggccaggtaccagacaactatggcaaactcctatgacccagagcccctctgaaaatatccaacctaaacaatcatagacctgattgttctgcctcacctattccttcccacagaaaccataataaagacttatatcacctgtgcccaccctggtacctccttgtgtggtccttcatggcagagtgtgccccctggtctgggaatctgcaggtataacaaactaccttttcaatggcagttgtctactgatctgttaacattactatatatgaataacaataaatcctattaacacaaagcactaccctacagcaactacacacagtctccctccatcacatattcatgagaagataaaattcttataaaataataagtatgtcctaatcttagaaatgctgaattatggggtcagtgacacacaaagcatttttataagtaggataaccctttcacattaaataaaaatcactgtcagttattttgcatcaataaatggcttctttgacattcttgattgtcaaaaagtcatttttccaaaccatcaacttctacacaattcctgagccgtgataacagcaaccagcccactccaacaaagcagtcagactttaacaatactaaatggtgtttaaggtaaaagataactttgagtcagtctgtctgaggagttgcaggaaaaagatagaagagggtagacccttaacagtccaaatttctgtgtggctaacttgaatcaacaagactttgatatctaacatcaaaatttccattcataaggaagaagaaggcaccaaacaagcttctcaactatattgtttaatttaattctcaacatcatactataaggtagagttaaactatcctcacttcatagatgtgaaatacaagactcaggaatactaagatgcttgcctgttaaatttcaaaaccttattctcactttatgcatcatgttcttcccaccaagtcccagcatattcacaaatgtctcaaactctttagccaaagctgttgtatagtataaggtaattctggcatttcaaataagtatttggtattatctataatctgttttttttattataaacaattaaagttgggtgaagtttcaggtggtttccagcataaaactcaaatttagttttcaactaatctcaagcttaacgccagtgggccacagccagcctcgggtatcaccgatgtagtgtttttcccgtatccctacataacactaaggcagtgtctacacttgttagattgtatgacccttctcaggtagtctatttcagtaccaagatccagttcagcacgaagacgccttcagcccagaatggcctagccagattcaaggggtgaggtgaggaaggggggatacacagtgaaatttgaattgcagataaacagcaaataatgcttaggacaagtaagtcccatgaaatatttaggacatactttctacaggaaaaaaagtattccctatttatccataatacaaatataaccaggggtcctgtattttacctggcaaccctagtccaaagtcttctagaaaacctgaattcgttctgtggtttcatccagaggtggctctgtgctgagaagaaagctaaatccagaacccagttcccacacatttcttgaaatataaaaatgctatgaggctcctctaggccacatctgtaggtaatttcactcccatgacccatcctaatttgaaaaggaaatcacagagataatctagaaccagataagcttccagggtagaagaagcaagatggcatggttatttacttcactaactcattctttatccaagtaagacatacagaatctcagacctggcatttgatgtcttttttttttttttttttttttttttttgagatggagtttcattcttttctcccagggtggagtgcaatggcacgatctcggctcactgcaacctttgcctcctgggttcaagcaattctcctgcctcagcctcccgagtagctgggattacaggcgcccgccgccatgcctggctaatttttgtatttttagtagagacaaggtttcatcacgttggccaggctggtctcgaactcctgaccttaggtgatccacctgcctcagcctcccaaagtgctgggattacaggcatgagccaccgcccccggcctgatgttttcgtaatagatggatgtggggacataagaaagacagaagagaaagataattgttattaaataaacctagaaacaagttgcatataatgccatctttaatatatcagaataggttttattatatgtattgctttgattttaattcgcattttctaataataaacagttcagagcatgattattttggagaaagtgctgttcctatttcagactgtttggaagagacttatatttaattcactataatatttctaaattcttcttgtggtggttttagccccatggtatgttatgatttcctggacccacaagatggggaggcatttcttttgtcaatgttgtttcctgtgagaataattcatttttaaagaaaaatataatttatttatcaaaattcagactgctattgctgcacattacctgcaaatattttatgaggtttgggtttttttttttaactttgaaaactcataacttgtttcagtaagggtgaaagctttgactgaaagatgaaaataacaatgacagtctcacacaaagtgtcaaaaagggtttcaacttgagggaatattggtggtttggtgacatccatcttagtatatatttctagaacagtgaatatcatattgttccacttgccaaaatgtcatgaatttaaagctggtctcagaaaataccatcaatgctgactgtgaaatttcctgtgacttaagtggaagaacaatattacatgctctcttttgtgcaagaactgttattattaaagcaatttaaatcaaagtcagtttttctgggtcagccatatagttggaatgcctgattacaaactccaaacttgttgaggcaatgaagacacttaaagagagttcaagaaaaacagcttcttataaatgactttttaaaatctgatttagcacccccatccaagataatcatagttcaagatatttccatatataagatgagcattagaacaagatagtgatggcagtattagcaatgcattcactgtgaaaataaactggtagtgaagtgatcacagcagaaagtaatgaacatgaataagaataccatttggaaggggtaacatactgggactcaagcaacttagcattgtttggacaagataaccttgatagctacttcctgcctttcggttccatgattctctgattatcagaaaactctcatcatacatttcaggatgcatgaggaaatgacagaaaaattatttacatttttgaggaaatgctttttatagctgatatctttttaaattatttgcttgcattttctttcttctttttttttttttgaggggcttaatataacaaagatttatttcttcctcatgtagatattcgttacacgttgtttgggactccatgccatataatcacacctgggacacgttcggtcaattgaggattcttctccatgtcattttcactgtgggagccaacctgacaaagcagcttgaatgtggaaaaactcaaactgtgtttctcccactattatttgtattttctttatacgtattttcacccaatattttgtttcttagagtatttaagtgcccagttcttattaatgtgaataattttacaaaaacataagtcaaataaggctgtgctattataatgatttgatgtctgacattattatccaagtgtttatgatctcatttccctggatatagatgtcattgttgggaaattaatcaacaaagacacccttactcttcttcctcttcgtgtgtgtacacagaagtctcagaactctatgaaacatctagtttctctctgccttataagcaaataaaacaaaacttaaactttatattgatagttgtttacatggtttagaatagcagtttttaagctgtgttctatggcgccctggggttccctgagatcccttcagagggtccatgaagttaaaactgttttcacaataatactaacatatcatttgccttttttactgtgtggacatttgcactaatgatgcaaaagcaatggcggagggggtgggtaaaactgctgttgtcttaccgtgaatccaggaagtagcagtaagtgtaataacattcattgtatatgtcattgaaaatatattagttaagttcatagaaattttaaaagccagttttacttaataacgttgttgatgatgtagtagaaaatactgtctcaaccttgagttgaggtcctttgagaaattttgtgtaataactgagaagtacacagaaagcattcctactcatactaaagtgtgatggtgtcaccaagaaaagcaggtggcagttgtttagggtgcaaactaaaccagctgccttttgaatcgaataccatgtttgcttaaaagaacaatgacaacctacatttactaataactggagatttggtgacattttcttgaacatgaacaaggtgagactgtcatttcatggaaaacaacttacagtatttgttaccaatgatgaaattccacttttaagcaaaaattagaattgtggaaaacttatatccatatggcaatgagcttggctatctcacaatacttacttttgtgatgagatttattatacatgaataaatatgatttttatattgtataataagatacagcaaaattcggaagctctgcataactcaggaaccaatattttccaataatcaatgcataatcttacaaaatcatgtaggggtataagacacattcaaagggcaatagaaaccaatacattttaagccaggagtatacaaagtttattgacttgatttcagattctgctacaactaacctttaaaacactaaagacattatgttttgatggtgtatcaagaaaacatcaacaattatctgagaagactaataaaataattctcccttttctaaaactcatctgtgtaagactagatttttcatatacttcaaccaaaaggtattacaagtgactgactgcagaaacagatgtgactataattattctactgccttctaattagccaaacattaaagagattgacaaaaatgtgaaactaagacatcctttttgcaaaaattatattaattttgaataatgattttaaataaaaatatttcatttttattaacatgtgatggatttattatttaaaattattaataaatattttaattcatcagttttaacttctcatttgttaagtacttacagatataacccatatcacagcaagaaagcttgtttcagaacacaataatttttttttgtttttgagacggagtcttgctctgtcacccaggctggagtgcagtggctcaatctcggctcactgcaacctctgcctcctgggttcaagcggttctcctgcctcagcctcccaggtagctgggactacaggcgtgcacaaccaaggccagctaatttttatatatatacatttttaatagagatggggtttcaccatgctggccagactggtctcgaactcctgacctcaagtgatccgcctgccttggcctcccaaagtgctgggattacagacgtgagctactgtgccggcctaatttttaagatggtaacgatgtcctgagaacagaaatttgaaaccttctgctttagagcaatgtggaattttctatcagcaaaggaattgtgagaagtttttagagcattagttgcacaactaaaacaatttccttcctattcgcttaggcaagtacccaagacatatattccttccccttgtgcatttagattttaaaaataaaagtctttccattagcattgatcaactcaggcatctcttctccataaactattccaatgagtctctgctcaactaaccagcttctctctattggaaaaatgattcactattgggagaaagacacttacaggaacaaattgaatcacaggtttctagagatgctttccaaagaccatgttatgacattttagtgcttgctaagcagtaaatactgacttactttcctgctacactcttcagagcagaaagagaaatctacaaaaagggcaatgtagttgggatccaccacagccttgagactgggccatgtttctacagcttacccacattttacccccactttctctgagaaacaatgcaaactggagaacaaggtcagagaagttatcttggatggtagaagagaagaaaggagaagaaaggataagcagaaaatcaaaaagggcataaaaaaattactggggaaaataattcttagtcactcaccatttcttatgtttgtgaaaacagaaacgaggagcaagtgttgttgtaagaattgttcttgcccctccccctccaccacccacatctgtcaagctatccctgtttcactgtttcctctgcactctctattaacttctttgtcctcctcttttcttttcctacagcaaagactttttgtcatgttttgtttctttttctattgtttctttcccttttctaatccttgaagactatcttttccccttctcttttccatttatctccttgacctttcaaatcttttttattctttagtctcctaatgcattttcttctcccatttttccctttctatactatgcaaatggtgtttaattaatcaaaagcaatatatctgaaatttccaaacttgaaacatgagaccagtaggaccgacagatttgtaatctcaaggtactccgaggtcacaacattttgaaattgtgttttcttttaaataaaaatctagaatacataaaacatacaatacaatacatacatacatacaatacaaacatcttctagatgatccggaatgggtatcttttttaaaaatttctactgctcccttttaatgttgcactttgtgttcatatttacaattgtagaagtctacattaacgtcacattatgtcatgtcatattattaaaaaaaaaagtttcacagtagttaattgggagaattgaatcatcacgtaataacacagacaaatctaaattttaaaaaaacctgtgccctgtgcaacctgggtgtggtagcacatgcctgtaatcccagcactttgggaggccaagactggcagatcacttgaggccaggagttcaagaccagcctggccaacacaaaaattgactgggtgtggtggcaggtgcctgtggtcccactgctcgagaggctgaggcaggagaatcgcttgaacccgggaggtgaaggttgcagtaagtggagatcacaccactgccctccagcctgggcgacagagcaagagaatatattttgcagatgctacctcaatttgtatcgctttaaaacagtgaactagcataagtatagtagtaaatataggctgttgttctgttcctaactccaataaaatacattagcttatcatttaatgcagactccaacactttcacagtactaaatgtttcttttctttcttttttttttttgagacgaaatctcactctgccgcccaggcaggagtgcagcagcgcaatctcggcttactgcaggctccccctcccaggttcaagcaattctcctgccccagcctcccaagtaggtgggattacaggtgcctgccaccacacctggctaacatttgtatttttagtagagacagggtttcaccatgttggccaggctggtcttgaactcctgacctcaggttatctgcacacgtcaacctcccaaagtgctgagccaccggacctggccagtactaaatatttctttagtacaaaataaaataaatttcaatgacttatcaagaatctccttcctggccgacacagtggctaacacctgtaatcccagcatttcgggaggccgaggcgggtggataacttgagctcaggagttcgagatcaacctggccaacatggtgaaaccccatctctactaaaaatacaaaaattagccaggagtggtggcacagacctgtaatcccagctactcaggaggctgaggcagaagaatcacttgaacccggagggtggagcttgcagtgagccaagatggccccactgcactccagcctgggtgacagagtgaggccctatctccataaataaataataaaaaaaagagtctccttcctaaaactgacaatcaaggaattttcttcatcaaaatttttgtcaagaatatatcccattggtctttctctttgagtactgagtgaaattctagtcggctgacttccagaagaaaactatcaggatagagcaggtagattctggtgagaagtaacactcagagaaaggaagacatacaatgtgattaaacctttagcagcttttggcctggggccagatgcagtccctgtggaacacaggacaacagaggaaactacggaaaaaaacagtatgttctaatgtggagaagcagaacacaatctaaggaaagcacagctgctggaaggagtggaagaatcttagaaggtacagagtcagaaagagaatactcatatttgtctgccatgtcagtctctggcaactcgtgacccaaaacgtgcaaaacagactcaaagcagctcagctacagacagaagatcttatctgagaccagggctgccgctcaagtgtttgcagttcaaatccaatcaatgtaatatcttcagaagcaatgggaaggacactcatccgagaaacgtaacagaatccagtgtttctgttcttacactcaaaatgtccagtatataatctttcagaattatgaagaactaagaaaatggaacacattctcaaaacaaaatctaatgttttcaatctcaaaataactcatgttagaactagtggacaagaattttaaagtagctgttataattcccttaatgaagtaaaataaaatatgtttgcaataaatgaaggatagaaaattgtagcagagaaataaaaacaataaaaaagagcaaaagaaattccataaacaaaatatacaatatctgaaataaaaattttactgcagggacatagtattcaaatggggatgacagaagaaagaataattaaacttacagacagatcaatagaaattacacaatgcgaaaaagagaaaacaggatgaaaaataatggacactttcttactgacctatgggataatatcaaatgctcaaacatatgtctaacaggaaatctagaagaaaaaaggagaaggaatatgaaaaaatatgtaaagaaataatggccaaaaatttctcaaatttaaagtaaaacaaatttacatattcaagatatttaatgagccctgagtacattaaacacaaagccatactgagacgtattataattaaccagttgggtagaagtaattttgaaaatggaatgagaaaagcaatgagaaagcagaaaaggaaaaacacattacagagaaggagagtaattcaatgttatggaattgtggaagccaaaagcaaatagaatgaagtcttcaaagtgttcacagaaaaaaagcctgtcaactagaattctacatccaatgaaaatatagttcaaaaataaaggcagaacttaacaaagaatgaaatcctgccatttgtaacaacatggatgggcctggagggcattatgctaagtgaaataaaccagacatagaaagacaaataccgcatgatctcatttatacatggaatctacaacagtctaacacagagaagcagagagtagaattgtggttgccaggggctcggggaaggaggaaatgaggcagtgttgatccaaaggtaaaaagttccattcacgcgaaagaaaaaagttctggagatctaccataaaacgcagggtctatgattaacaaacggtattgtattatattcttaaaatgtgctaagaggatagatcttatgtaaccttattacaaaaggggaaaaagaaaacaaagtgggcagatggaaactttggagttgatgtataagtttatggcattgttggtgatgatatttgatggttttacaagtgtgtccttatctccaaacaatcaagttttatatattaaatatctatagcttttcatatggcaatcgtacctcagtaagtcatttttaaaaaagaataaaggcagaataaaaacattttatagaaaataaaagattattgccagcagatctgttaagaaatgacaaaggaaggttcagaatgaaaggaaatgaaaccatatggaaactcaaacgctgagaaaggaatatagaacatgggaaatggtatctgggttaacgaaaaaagtttgttttgctttatttctcttaatttctttataatacatataattgcttaaaccaaacattataatattttcttaaaggatttataacatgttaaaatgcaatatatataacaactacagaataaaaactggggagggagtctgatatggacctatatgatttcaaggtttccacattatgtaaagtaacattaactgtaagtagattgttaaggatatatattgtaacctctatttccaccacttaaaaagtgacagaagacacatagctggaaggtcaacagaaaaatcaaaatggatttctgacatttctaaataataaaaaggcaggaaaaaatagaaggaaaaacaaagtagataaataaaaaaaataaagtagctgtattaatgccatataacagagatttcaagtcaaaagttattactagtgacaaagaagctatttcatagaagtaaaaggatcaattcattaaaaagacatgattaaaaagtgtatgtttttaatatcacagcaggaacatacaaaagtgaaatttaacaaattaaagggagacatagacaaatccacagagttggcgatttgttaaatttctctgttagcaattgatagatcagctagaaatcagcaaagataccgaagatatgactaacactctcaagcatattgaccagaatatttgtggctaaatttacattttcaggataaaggatgatatatcagaatcaggtcttaatggtggtcatattaatttgtaattgtttatttctaagtatatcaatagattatatatttctactctagtatttcaaaagcatccaaagcattttcaagaattagaaattgtccattctaacaaatgaagcatagatgataccataactgtcattccacatattacagagagcagtttggaatgtgcgctctgaggccaagtgtacttaagttaagtcccatctctggcccttcttagttacacagcttgggtgtatcacttaatctcccatgattcttcactttctcttctgaaaatggagataatgatagcctctatctcacagagttaagcaagaatattaaaatcaaactgttatcgtggtcactgtgtcattatcaaaaatggaagccaaatttgctttgcatctcagtaaataaatgaattttcgtttgaaaagtgcaaataaatcaaacttgagatgatcacaaggagcctcttaacactgttgaaaccactggaggtttatcctgcaaagctatttagattaaatctgaaaagttcaaatctttacaccaaagctgaaccccatatggttcaggagtctttgcctgaaaatacatatgcttaagtagagttttcaatttgtttctttttgaaattcgtacagtttcccctcaattgcacccaaatgtttttcatttccttctccaggttgacaaagaatattgattttggtcataacagaattctctccagagaggtcagagaggttcttgttgatactgtctgatttaaatttcatttaagctgcttgtttttttaggcattaaataaaagaaattatctatagccaggaagagggtgtaaaaaggtgacacaagttaagaccacctgcctcctgacagaactgaagtttaaagtggattttttctttgagtagactttcaatcaagtaatatccagttttaaaataacttatccaaaatctttgatatttttcattatgttttccaaaattgacaaacgttagagtataagagtttaggtagaattatttagagttagagttaggtacaattatttagacttagagtacaaaagttagagtacaaaagttagaatacaaaagtttaggtacaattatttcctttgatactaattcaaaaagtcttcttgaataagatacgttttgttaacatttttcttttctagtgttttcttattgtaatgcactcatgaaagagaaatattcaacttaaactttcagaggaaaaaaaagcttaaacaaatatgatcaatctttatgtgtgtcaagaagcctcttaaaattacctttaagccatatgaaaaagacgaactatacaaatacttgtttctcatttcaaataaacttgtttaacaaactcattttattgtttattttctcaatcatgatgtttgattgatttaatttgcatgtccatttcataaagcatgagtgttcatactgaaacaatgcttaccaaggacaaagagcattttctcatcataactggtgaactcccaccataaagccaaaaatgaaggaaactgagatctaaaaatcaggtatcattaaaataataacagagtaagagagcttcctatgatatgtaaaaatgtaacatacttttttcttaaaattactttaaaaatactcctggctgggcacggtgactcacgcctgtaatcccagcactttgcgaggccgaggcagtgaatcatgaaattaggagttcaagaccagcctggccaatatggtgaaaccccgtctctattaaaaatacaaaaaattagctgggcatagtggtgggcgcctgtaatcccatctactcaggaggctgaaccaggagaatcacttgaacctgggggcggaggttgcagtgagctgccgcgccgctgcactgcagcccgggcaacggagcgagactccgtctcaaaaaaaaaaaaaaaaaactcgtatttcaacatcaaacatgtcatgtattagctttcagggaaatggttgtgttgaagatgaaggttcagcttcacttacaatggcagagtttggtgtctatgcaaaatgccacatagatttgtctttttaaataatttcaaaactgtttacgatttgatttgtactgccatctaaatccatagcaattattccacaatcaattataataatgaaagaaaactgtgaaatgtagatgaacatgaacatagcttcaaatgctgtaggtaattacagaaactacgtaagtgaagataaaatgcttctgctgtcatttactcatgattagctattaaaacatcccgctaggtgttacccaaatattgcaatgggtacttgccaagtcaagactaagctatctctaatagtggctcacatatgttaataaaaagcctaagagtaaaacctacacttgtaaactgaaagggatttatattttatttcagtgtgtagtatatattaatattaatttatgttaattattaatatgttaatttaagaaggcaaagaaaagttaccatttactaagaattttattaaatcttagttctccttaaatgagaaaggatgtcaaatagccatgctgaattactttaaagtaaaagactcatctccctgcaccagtaatgtactttgttccatcctagatttcacaggctaaactgattagcagctcaccaggaactgtgagaattattcaaaagaactagaagagagaaaactcgatgttgtgagaaggtcacataaagaacaatgaattatacttaggaactttgcatcctagagctcataaaatgaaaaaaaactccattgctttttctctcagctcagtgagggggatactttatcaaacatttctgaaagtaagacatcctgctggctttattttattaaacaaggaataaaacacattgctttattagagttgtttcaagaatgcatcaaagctgtgggctctcaagacagaaatcaaagactaaaaaaaaaatcgcatctgctgtatattcccccaaaaaatatatttgactataattaatgtagaattgaaagacaacttgtagaaatatgaagaaatcacgtgccaaagtgattatacatttaactttcccataaccataacatcatgatatcctggccatggagaagtttatcttcctcattatataatggtatgataattgttgagaaataacatctgggaaatttaagagctctcaatgaatcatatactcaatctgggtgacttttcccattggaatttatcagattacacctatatctgaatcatcattttattcagctgggttacaaatgtgacttcaagcaagaatgatttcagtcccattttctctctgaaaaagtaaagagttctgagcaggcagcagatcacacatcgggctgtgtgctgctctgaagacttggagagactgccagattgtgggtcccagaggcaaaattaattcactcccacagccatggctgctcaagtatttccctggcttgtggtcctgcctagtctcttcccaatcccaccctggtgaggctgaagccatgtgtggggattctcatctcccattttgttagctcatctctatcagacatatttttcaatttggcatataaaaagataataaaataaaaagagaaataagtagttcatactttttacctctatctctgtaaccttaggacagtgatcatggtatggttataaatactccattagtaggccaggcaatgcaatgtcacagtgaagaatatatgctctgaatttacacagatcttagaatcttctctgtcacttaccaactatatttgaagcaagtacattaactgctctgtgctcagtttcttaacttgcaaaatgaggataatgagggtacctaatttaaagtgttgagagttaaatgagaatgttagtaaaattctaaaaagaatgtttgcacacactaaatgttcaataaatgttagtcattattatcattattattaattattatgataatgatagtcaaaggctaatatatgaatatcaatattactaggtaggaaactgaggttaaaagtcttcaagaaaaagtcaatgtgtcaaggagatgactgagaaaaagaaatacaacaataatggggacagaaacaaagaaaaaagaaagaaaaactgtaagaaaggtcataggttacatggctaaaaatattccaactcaaaaatttcagttacagttcttagatttccactctgaggccaaaacataccaaccaactcttcggatagtcgatccactcagttattcagcacacagccacttcatcttgtttaaggccatcaaaagaatgagctagagggattagaatctaaagtagagcactgcctcttgtgaattacattcagaggaataagaaccatggaagagtaggcatggattgacaagaccttctggccaaatgaaaaccctgagtagaaaaaaagagtaacagtacaaaaataaataaataaaattttaaagaagttgaagagagtgaaaacaaaaacaaataagcaaacaaggtcagagggacagggcaaaagatcacagtgtcccccctggtattctgttgtttgaagaattgaagacaagcaggttgcatcagaaaggggagagtatttttttcccacgaagtataataaatgcctcaaacttctgggctcaagcgatccacttgcctcagccttgcaagtagctgtcattctgaggggcttcaaaaaacaaagaaagtgtgacctatctactcaacactaccaactaactcttccttagactcagactccaacaatcaaaaagtaggctgatacaacttctgctaaatttatctgctcctactgctcccatgataatgtcttctatgttatactttctttaattttcaccactgattcattgcctttattcataaacttactactacctgatattaaaaaatgaatatgtatttacaaatcaaataagttcaattaaagagtataatgactacatgtcatatgccaatgttgaactatggatgtttcaacacttcaaatgggccagcagcctctacatagcctcaaacacctttagcagatgaactttaaaacccactaggaagtagagatgagtcctgatttggactgtgcactttcccttttgaacaacagcactgaattcaggcttgtgaacaatacctgccagcaaagtcatgagctagtagccaactgaagtcctatctttgggccccactgaatcatgagggaggcacagaatgttctatatcccattagccacatgggctatttcaagtgcagaagcaacaaagggtatgtggcaaacacaacctcaaaaatgcatccaaccagttatgccaataacaaactatcacaaatctcaactgctatctctgcaaattcaatagactgactctagtcacacaatccagcaatgaatgattccgtcagcatggtaacaacaatgccttaaatttgtaaagctcttcatggtaactcattttcccaaatctcctttgattctcattcttgagatgacatgtaagcagtgaagcttttcttaaacttctaaattcattatttccttatttaattttcattccaacttggagttttacaaaaccatatggtcatctcaatccaaggtagctagcattagcctatgcctcaagttacgattgacaataatttgcttcatgtcagatttcacttcactaaagcaggactacaaagagctatatttactatatgaccagaaaaatttaaagtcattgcaacctttaaaaaattatagttatgatggctgggcacggtggctcacgcctgtaatcccagcactttgggaggctgaggcaggcggatcacgaggtcaggagatcgagaccatcctggctaacacggtgaaactccgtctctactaaaaatacaaaaaaacaaaaaattagccaggcatggtggcgggtgcctgtagtcccagctactcacgaggctgaggtgggagaatggcgtgaacccgggagggagagcttgcagtaagccaagatcactccactgcactccagcctgggcaacagagtgaggctccatctctaaatatatatatatatatatagttatgataataagtgatgcttcagtggcataaaaaggatcttctctgcatattcctttcagagatgaagttttatttatttgcatctgaaaacttaatgggtttatttcaagctgtcccatattttggccaaatattattttctacatcactgtgatgtttgaaaacaataagcatattatctcaaaccattttacatttaatgacactaagaaacaagtaaagaaatgctgaaatcttgaactaggatcatgttcattacaaaaatgtcaatcactgggtgaaaagtgtggttctccaggcagatgtttagaaccctcaacagaatgaacttttaggacaggattttggacaactttgtgtctttacatcaaccattgagtatgaaaacatctattgacctatagcctaacttggaaatacaagagttcacacaaatatacgaccccggtaagttggataggcttgaaagcttaggaggcaaaataaataaaatggagtaattatagggacaaatgctttatctcccactgccaaccaaaaacaaatttataaattgtaggaggaaatgtcaattaaggtagtgtctatctcccactctgcacatagttttttatacaacaatgagcagcggatgtgaatggaaaatgcatgctgcacagaaagaacgggcatccagcagaagggctgctcccaaaagaaaaaaaaattgtagaaacaataccatggtaaatgcttaaaaaatattttgctttctgcctcttcttttctcattcctgctacctcccacttccacctctcataccaacatcttcatcagcttttgttttcattttgtgtaacaaaagccagggaagaatagtggaaattgttatgtaaatgcaaaaaaatgttcattttcaattagaggtgacattaccctccaaattccaactggatctgattcaaaaagcaagagaagaaggggagaaaggagcttaattgaaatataaaattgagagaggatataaattgtaccttttcttttcaacaagggctgaatttacattttttaaaagtcaaaacagctaacattttggcaaacaagctgtttctgtttttgctcaactatcatgaaaagcaatgcagagcagaagttgctttctgtataaaatatggtagattgaaaaatgtttacaatccaaaggcatattctgaaactaccatgatatagagtcacataacctggagttaaggatcctacattcccctctctactctgctgctatcattgactcagattcttctatattgctaaactagtctcctagtttacaagctagtcatcctttaaagttccattgattctgacaggccatgaacaaagacaatgtcttttctgcttcctttataagaggcagtataacttagtggttcaggtctcttaccttacagctcaggatgtcaatgcttctatttattccaatcacttattagctgtatagtcttagacacacctatccctcatgtattcatctgtagaatcaaaaacattattatatgatgttacatgtaagggtcatataagcaaagttacccccagatgcataaggagccaagaaaccaaagaatgaagcaaacaaatctagtttgttagtaaatgctgatttattaggtaaacttacagacagaagtggtcttgggtggccgcaagacaggttgatttctgtactgaaagacctcagacccaggacttatatctcaaggaaacagcatatgttctctggaaggaatgtgtaagtaactgctgtgggcatcacagcctacaatgtatgcaacatcaaagtttgtttcggaggaaagccaaaacttacagtgaataggtatttctacacaaagagtaatatattaactagacatttcggaggcattcctgaacttggggtttgttaggagtcacatgatggattctcatcttaaactgaatcactcttgtccccatatacagacttaattatccataagataatttaaaaattagtgaatagcttcgatatgccaaaagctgctctaagcactggaaatactgtgatcaaaaagaacgcaagtccttgacctgtaaacttagattctaattaacaaagaaggaaacaagataattttcatgatgagatatgtgctatgagtaaaatcaaaggaatgatgtgtaaaaaagtgactgagtgaggaaggcgttgtagatggcatggtcagagatgacatctaaaaggaagtgacacttgatacctgacaaatggtttgtggaagccagccaagcctagaacctagaagagagtattttaggcaggtggatcataaggtacaaaggtcccaggggttgtaggaacttgacttttagaaaaatacaaaaggccagagcaaaataagcgatggaacaaatagtgggtaagatggcccaagccctcagcctgggcagtggagactgggctggaggtagactgtgcttgaaaagcttagggacttatgtggatgtcctctatttccctctctccatgcttctccttcctactttgtgaccaggaggctgacttccactccaatgaaaggatccttttcacttgggttcagccagtataggtatactaggctattcttgcattgctataaagaaatacctgagactgggtaatttataaagaaaagaggtttaattggctcacagttctgcaggctgtacaggaagtatagcggcaactccttctgaggaggcttcaggaagcttccaatcacggcagaaggcaaacagggagaacaggcacatcacatggtgaaagcaggagcgagcaagaggagaggcgccacacacttttttttcttaattgagatggagtctttctctgtcccccaggctggagtgtagtggcgggatctcggcttactgcaacctccgactcctgggtttaagtgattctcctgcctcagcctcctgagtagctgggatcataggtgcccaccaccacgcctgactaattttaatatttttagtagagacaagctttcactatgttggtcagtctaatcttgaactcctggcctcaagtggcctgcctgccttggcctcccaaagtgctaggattacaggcataagcaactgagcccagccaatgcaacacacttttaaacaactagatctcatgagaactcaattactatcacgaggaaagcatcaaggggatggtgctaaaccattaaggagaaatcctcccccatgatccaaccaagccccacctccaatactggtaattacaattcaacatgagatttgggtggggacacatatccaaaccatagcaataggttacaagcaggagctcagaagcctaaaataaagtgacgatgtttactctaatgtttagcttaagtcactaatatttagctctactcttctacgaaagccacagccttagggtgggaatggcctaccacctttgctagccccagggttttgtaccgtgggtacagtaccaattgtttttcctaacttctgcctacagggtttagtccctgtactaaagtttcctcaactgatccagaatgaatgtgccatctctttcttactagtaccctgattgatgtgtagaatggggtaagattttggagtttaattctaaaggacacaatatatgtaaaatgactcacaatgtacacagtaaatactttgtatatgctcatactccttatgattttcccatctagaaaaattaccatcaccaatgcatctgaatattgcattggggtatcagaaccctctcttttgctcccctaggcagtggtcaacatgtggatttatagctttcagcaaaaagtgaatatggatcaaatggaatgcttggcactgcctcatccttcccccatgaaaatgcagaatggcatatcatgaatatatgagtgagattaactaacacactctggttaagtaagaaaatgtgtaattccacatttttaaaaatgtgaaacggtaaaggaaatgcaaagccataaaattagttttggtctcataagtatctccttgataaactgtataaatgcaaaaaaagttatcaattaactgaaaaactataagatattcacaaagggaacaactagaatgcttgaacctactgcacctaaagtgttgcttgcagtaaagcattattattttttctcctaaaataaagatatattaaaatttgtaagacagaacatcacacttgagtatatgctattcatctgataaatatatcatatttctcccaagactgcttagatgtaatttctggtttcttcattgtaagatataaataggaagatatttaatcaaagttttggttttgtataaacctagattatatgtatatatttttctccaagcttctagtaatttctgcctccaagattataaattttatgctaacctgggtgaactgctgtagaggtttatgcaggaatttggtgattttgctcagtagaaacaatcaatatcaagacttacgtcaactctcactcttcacatgagttttggttattaaattttaattattttcctggtcattatagcaaaatcatcaactgaatacaatggaagcgtgagagtgtttctctgaacttactgtatgtagggaaacttcaattaggctcaacaaattagattacttctgaagttcatagagtgaaaactataaagttgaaaattacatagtgaaattgaactacataaaaaatttttcacaaattgaagccttgtcattcttcctacttaccttaaaggaagaatatttctatttgtaaaataaaaatagaaatttttatttgacagtgaattcagtgaagccagtgagcgaggccattggaagcatatgtgtaatgtcaaacatcagaagagatcttccaggggaaggggtgcagctggtttcagagtgttgggggaagagaaaagatttaacttacattatccaccccaaggctcaagaattgttaagcacaaacctactgataaatcatattgttttcattctactgtaatgtatgtggtttaaagttatgagaataaaaaatatattcttcccatttttaccagaatctgtttgaatatactctgaatttccctatttataaaaattccctctttaggctagtaactggctaatttccatgctcagtcttacaatttgctcattttttatgcattgatttattcaacagatacttatggaatgtctatctagttaagtgctagaaataattctaaacaaaagaatatgacaatttattgaaaatatatgattgtttcacagaagagcattaataacctctaaccatcagatactaagttaatactcccaagctaaacaaaacaacaacctttttacagttatattgggattctgtaaaaaagattttttttaatgaagcatcacacttgccacagttttatttaacctggtatttatatcaagtgtaaagaggactattatagataagaagactggagaaggccataatattaatgtcagatttgacctattgtaaaattcatcttacctggaaggttaaatcaattccagtgctgcagggagagtcttcatttacacaaaggaaatttgacaagggtgtttttctgagcaaaagcagtagcatactgcattgtttgaagcaggtaaacttataccatgtctcttctagaatgtaccaaatgtaaatccttttcattctataaatactttctaaagtactcacattctttaacttttaaaaatctactttattttctttcaaggcacttatagcacttggggttaactttttagcaaatgacaattcttaatgacccactttctaaatagaaagtgaaaaaaacaatctcacaacaaatcctcaaagtacaaaagcaatgacacttctaaagtaagctcccattcagctcccgggtatctttaatactcacagatctcatcttcttatggatttaacaactgtgctttaatgtgctttaggtctagtattcatatcttccactattccctttgataaagataaataagcttatggagacagtgctgcccctgagactgcaaattaaggagcgacttatcaaccgaagaagataaagaagaaatgtgacattggcaatgcttttaaatagcaatttaaaattgcccgctctaactcagtgattgagtatttaaaaaaagcaacaagaaaatcaactcttcattccaggtatggactctgaaaatgaaaaaggcagcgtctctttgggcctaggtctaactgcctgctggatcagggctccttcagactccgcccactgccctctcttggatgcattttctctccaacttgggtgcccactagccttgcctttgatcacagcctcctttattcttattatgttttcaatcgataaatatctgctgaatgattatattttacaatactaacaaatatttacactggttaaaacaagaatcatattatttaattaaaggagacctgagatctattacaattacaagtgtacattagaatacagggctgctctatagtcttgctactcaaaactgtggtacagggtcccataacatcagcctaatctgggtgtgtgttagaatctgaaaattgctgaacaagattctcgggagatttgtattcacattaaaatttcagacatgatgtgtttacctgaggatcttgttataatgcagattctggttcaggtctgaagcgaggcccaagattctgcatttctaacaagctcccagctgacaccaatgttattggtccataaactgaaacttgagtagcaaagatgcagaggaaataaaaatggttctaagcatgtagacctatctaagttatcagagccaattgccacctttgaaatagccttactgaattaaacagaagaaaacttttaaaacttctcatttttatggtgaaaaagtcataaatttattctgaatttgtgaagtttgaaagagtagtacatctgtaaaacagaacagtctgggataatgagaaattgcatccagattgaaattatgtttccaaatattaattaatggcggcagtgagcagccgattggttgctacagcaaatagaaatatgccctagcataccccaggaaatatttgcagaacttagaacagtaaagggattaatatggtaagtgaaaagatcatagaaagaaggacgattgatacagaagttctcctatgttcataataagaattcaaaaagcaataatttgatgaagaaaagctctctgcagaagattgaggagaagtagcaaagacaacaaaattgaagacaagttcactgagctaaaaagagctaagaatttaaatcagaaaaagaccatctgaatactaggtaaaaatgatgagaaataaaagacaaaacaggtcttgataactacaagaatttaaaacaaacaaacaaaaaaacacctaaaaccaaccaggcagaaaaccaggtaacatacaaaagaaaaagaaaaccatataaatactaaaattctcctttttaaatatataaaaagcaaactgctcaacatctacaaagtacagatgactattgattgaaatctacttctggggaagatattattcgtgtttagaagcaataaagacattattatatgcaagaacttagaaaatatccttcacatgcattatttttttaaatgagatactagagcaaattttgatgcgattaaaatagatgtctttttggaaagcagtataatctgtagttatcagaattatttcctaaagaattgttaatctagtcatacgacagcagcaacatgtaaaatctctaaatatatgacattcaacagaaaagaaagagtgagaaaagatagaagggaaagaaaaaagaatgaaagtggaagccaggaagagggggaggaagtaaagaaagaacatataatctctcatattaaatagaaatttcaatctgtgactatttttaaatatgggctctagtacattttattttgtttcattataataatgtaaaaatagttatatctaaatcattataaaagtagcaaaaaatattaagcaatatatcagaatatgggaagtatagaatgtatttctagaaatccacaagtaaactctttagaaataaatactttaggcaggaaagattggtaggttcaccccacaaccacactacagttactcctgtagttatttgtaagcccttaccttactctttattaagtatacattctaatacactgaatgtatttcattccatagtgttggtttggtctcaacaaatctcccatagtcatcccatatcccaagggaattagcattcattaccttattcctgcagagcacctgtagttcagaagctgaccacctccagctccaagaatagactctttttcatttaatctaaacaactcccttctttctcccagccacagttaatattcctaaatgctctaattcagagtaagttgaagaattcttgcttagaatagttgggaaaaaaagtgctcactgctttcctgtgaataccatgatgcaatttaccaaaactgcaaaatcctcttcagtaatggcagccaagataaaagcaagaaaaggaggccagagccactggattgctaaagttctggacttccagttactatgatccaataaactgcctctatctttaggccactttgaaatgagtttcttttgattgttcctgaacacatattacctgatgcaaactcctttgttaccctttaaaagtctgaatttcaaagaatactttttaggagttaagaagctcttaacatgttgatccaagcaacattgctttcttcagtctggtgccccagtggggaaagcacatttgtagatggcatgtcctaagcaatgatttaaaatttgcttaggcttcatattttcaatattgaataatttcctgtttatataatctgggattgccaccaaaactgcaagttcccaagtcccctagaaatatacacatcagagcattctctctatagatggcaaaacacagaaaataatacaatttattgtagtaagactatctcatagaattaaatggggataaacaacaactgaagtcagcctttaaaaaacaagaataaaagtagaaagcttaatataattaatttacacattgaagggggaagccatataaaggattttcatagctttctcatttctcaagaattttactcatcaaaattaaaacacgtgtttgcttgaatgctaaacatgatgccatttttgattttcaatgtatgcagaaccacatttttcaacatcagaagtataattttagaaatgatttttcaaatcactttctctaaagcacacttattagatgacatcctagtgcatttgggctgctgtaacaatgcctcagactgagtaacttgtaaacaacagaaatgtgttgctctcagttctgaatgctaggcagttcaagattaaggcaagatttggtgtctggtgagcacttgttctctgcctcatagatgacgccttgttactgtgtagtcacatggcagaagaggcaatagggttcctttatgcctcttttataggaacattaattctatccatgaggtctccactatgacctagtcacctcccaaagcctcacttcataatagcaacactttggggattagattccaccatatacattttggcaaatccatgcttgcctgttgataaggtttggctgtgtcctcacccgaatcttaccttgaattgtagctcccacaattcccacgtgtcatgggagggactttatgggaggtaattgaatcatgggggcgagtctttcccgtgctgttctcatgatagtgaataaacctcacaagatctggtattttttataagggggagtttccctgcacaaattctctcattttttccttttgcctgctgccatgtaagatgtacctctagccttctgccacgagtgtgacgcctccccagccacatggaactgtgagtgtgaaaatggactaatatacccattaaataaaaaaaaaagctattttgctagattctgcatttctctccttatctgtcctgtagttgacaaccttcccctacttaatacataattgggctcaagatcattggttttgcaaaatcgctgaaattccaaactagagaagtacccctaataggaattgccactgccttgctctggtttcttcaattaagaagaagagataaaggataaaatcatctcatgtggagaaggctatagggggcacccatggcaaggaggaaatggcagtggggcagaataatgaaaacctgaattacagctccaggaatccctactttgttctttcaaagcaagctacagaatctccttaaacttcaaattattctagtacacagaccactttaagggtcaaatgtaaggctttttaatattatatgtgttcctattccaggtaagtgacttctatccactacttccttgtgtttggaacatttgatttagggctaactttctaactgtcactcattatttttctgttaatctgttatctccatcctcaagtaatttgcgtaaggatagttttaagtgtggaaatgattcatcaagggattttaaaagaatttgctttgctccattgtctgtggtctatgtaaatgcaggaattaaaatcagatagtctctccaggattttcccagcctaacaagtctgtgattcatgaggggagaagtttctgaaacttggaaatggctatgaattatatgctggagagctgaagaagtcagcagtccagtaggtgtctcaaagtcaaccactcttggatagtttctgaactattataattgctctcaaggctccataatcaccagggacttgcaaagcagagtgtaaaatagttatgaatgtggtcaaatgtatgactattttctaaaattgctaatgttcagcatataatttcttcaggcagaagcatccaatgtattaagtgtagtacacaggaagacaatttttcctgaacacaatctgtattctgccattttttagtttttaacgagagcctttacaatgcaggggtgtggagaattgacagattttgcacattttagtgttttttcacaatgtttgctatgttcagcagaatataaactttcagatttaaaatatgttctctagtttatcctactgtgcaaatcagtacattaagcaagcctagcagaaaaccataagcaggcagacaaaagctgtgagagagaggctttcctatcaaatgtgatgggaaataagatttaaatatgggtttgcccaccagtgtatgaaccagaagtcacagcccagaaactaaaaaaagtcacaaagcaaggtcaacagtgacacacaatcgtagattgtgaaattcgaaagaacctacttgaaataattcaaattaaaacatggccttaagcatactgcattaaatataacgtactaaaacacactgttaatataggctcaatggctataacaaataaaccagtgtggtgtctatatttcttgctccgtaatagtctaggcaggtgttcccggctggcaggcagctctcctctgcagggatcctgagcactggaattcctccatctcggatcctgccatcatctagggaattttcattgcccgcatcatgtcagctgttctgctatgttgcaagttaagtggtagaaggaaaaagatatggaggccacacgtactgagataatggcctcagcctggaggcacagtccttccactctcattccgtgaagaactcaaattacacactaactgcaagggaggctggaaaatacagccctgctgagtggccagaaagaagagaagggctgttggtgcccagcaaatttcagaaataagaagagtacgtacaatattcatcattttgaagaatttgctttgctccatagactgcggaggaaagggaggaactagaatcagatattctctccaagattttcccagcctaacaattctatgattcatgaagggagaagtttctgaaacttggaaatcatatcctggagagctgaagacgtcagcagtccagtaggaaaatacagacccaaaaatgtatgttgacatagccattctaacaaatgtaactgttggggaaatattttaagacattaaaaggaagttagactaattatgatataaaaatcacacaagtgtaaaaataattacaattgatcattttgatgtcttatcacaaaaacactactttgaaaacacaagtggcaacaaatttcaggatactaattttgcgaccatcactcaaatatgacatcaatgtaatttaaacaattcagaaacttaatggaaaatagaaaggagaaaatggttttcttaagacttgaatgtaagtccttctattaaacatatgagacttagtaagtaaccttctcatatttcaatttttcttctttaaacactgaccagatttctccctaactactcacaggatttctgtgataatcagacctaaaatgagacaaaatagagaaaacactttgacatgttgtagagctatatatataagacatttttagaatactaatttttatagttctccttgaagaggtccttcacattccttgtaaattgtattcctagttattttattgtctttgtagcaattgtgaatgggagttccttcgtgatttggctccctgtttgtctattattggtgtatggaaatgcttgtgatttttgcacattgattttgtatcctgagactttgctgaagttgcttatcagcttaaggatttttgcatcaatgttcatcaaagatattggcctgaaattttctatttttgttgtgtctctgccaggttttggtatcaggatgatgctagtctcataaaatgagttagggaggagtccctctttttctattgtttggaattgtttcagaaggaatggtaccagctcctttctgtacctttggtagatttcggctgtgaatctgtcttgtcctgggccttttttggttgacaggctgttaattgctgcctcaatttcagaatttgttattggtctattcaaggattcaacttcctcctggtttagtctttggagggtgtatgtgtccaggactttatccacttcttccagattttcaaatttacacagaggtgtttatagtattctctgatggtagtttgtatttctgtgggatccgtggtgatagcccctttatcattttttattgtgtctatttgattcttctctcttttcttctttattaatctggctagcattttatctattttgttaatcttttcaaaaaaaacagctcctggattcatgggttttttgaagggtttttcgtgtctctatcttcttcagttctgttctgatcttagttatttcttgtctttctgctagctttgaattagcttgctcttgcttctctagttcttttaattgtgatgttaggatatcgattttagatctttcccactttctcctgtgggcatttactgctataaattttcctctacacactagctttagctgtgttccagagattctggtacattgtgtctttattctcattagtttcaaagaacttatttatttctgccttaattttgttatttacccagtagtcattcaggagcaggttattcagtctccatgtagttgtgtggttttaagtgagtttcttaatcctgagtttaatttaatcgcactgtggtctgacagactgtttgattgctgttcttttgcatttgctgaggagtgttttacttccaattatgtggttaattttagaataagtgtaacatgttgctgagaagaatgtatattctgttgatttagggtggagagttctgtagatgtctgttaggtccacttggtccagagctaagttcaagccctgaatatccttgttaattttccgtctcattgatctgtctaatgttgatagtggggtgttaaagtctcccactattattgtgtgggagtctaagtgtctttgtaggtctctaagaacttgttttatgaatctgggtgctcctgtattgggtgcatatatatttaggatagttagctcttgttgcgttgatccttttaccattatgtaatgcccttctttgtcttttttgatctttgttggtttaaagtctgttttattagagactaggattgcaacccctgcttttttttgctttctatttgctttgctcatattccaatttttctttaaaccatgaccagatttctccctaactactcataggatttctgtgataatcagacttaaaatgagataaaatagagaaaatactttgacatattgtaggactatatatataagacatttttagaatactaattcttgtagttctccttgaagaggtcctccatccctttattttgagcctatatgtgtctttgcatgtgagatgggtctcctgaattgagcacaccagtgggtcttgactctttatccgatttgcctgtctgtgtcttctgattggggtatttagtccgtttacatttaaggttaatattgttacatgtcaatttgatcctgtaattatgatgctagctggttattttgacgattagttgatgcagtttcttcatagtgtcaatggtctttacaatttggtatgtttttgcagtggctggtaccggtttttcctttccatagtaagtgtttttttcaaatgctcttgtaaggcaggcctggtggtaacaaaatctctcagcatttcttgtctgtaaaggattttatttttcctttgcttctgaagcttcgtttggctggatatgaaatactgggttgaaaattcttttctttaagaacgttgaatattggcccccactctcttctggcttgtagggtttctgcagagagatccactgttagtctgatgggcttccctttgtggataaccagacctttctctctggctgcccttaacattttttaccccaaagtaacttatagattcagtgctatccctatcaagctaccattgactttcttcacagaattagaaaaacctactttaaatttcatatggagccaaaaaagagcccatatagccaagacaattctaagcaaaaagaccaaagctggaggcatcatgctacctgactacaaactatactacaaggctatagtaaccaaaacagcatggtactggtaccaaaacagatatataaaccaatggaacagaacagaggcctcagaaataacactgcaaatctacaaccatctgatcttcgacaaatctgacaaaaagaagcaatggggaaaggattccctatttaataaatgatgttgggaaaactggctagccatatgcagaaaactgaaactggaccccttccatacaccttatacaaaaattaactcgagatggattaaagacttaaacataagacccaaaaccatgaaaaccctagaagaaaacctaggcaataccattcaagacataggcatgggcaaagacttcatgactaaaacaccaaaagcaatggcaacaaaagccaaaattgacatatggggtctaattaaagaacttctgcaaagcataagaagctatcatcagagtgaacaggcaacctccagaatgggagagaatttttgcaatctatccacctgacaaagggctaatatccagaatctacaaggaacttaaacaaatatacaacaaaaaaaacaaacaactccatccaaaagtgggcaaataatatgaacagacacttctcaaaagaaggcatttatgtggccaacaaacatatgaaaaaaagctcatcatgactggtcattagaaaaatgcaaatcaaaaccacaatgagataccatctcacaccagttagaatggcaatcattaagaagtcaggaaacaacaaatgctggagaggatgtggagaaataggaatgcttttacactgttggtgggagtgtaaattagtttaaccattatggaagacagtgtggcgattcctcaaggatctagaaccagaaataccatttgacccagcaatcacattactgggtatatacccaaaggattataaatcattctactataaagacacatgcacacgtatgtttattgcagcactattcacaatagcaaagtcttgaaaccaacccaaatgcccatcaatggtagactggctaaagcaaatgtggcacatatacaacatggaatactacgcagccataaaaaaggatgagttcatgttctttgcagggacatggataatgctggaaaccatcattctcagcaaactaacacaggaacagaaaaccaaactccacatgttctcacttctaagagctgaacagtgagaacacattgacacagggaggggaacatcacataccggggcctgtctggaggtggggtctaggggagggatagcattagaagaaatacccaatgtagacgacgggttgatgggtgcagcaaaccaccatggcacgtgtatacctatgtaacaaacctgcacattctgcacatgtatcccagaatttaaagtataaaaaataaataaataaaaacagaaaaaaagaatactaattctttgagctcaatttttaaaattctaaaaacaagtaaaattatatgatctattaactcagtatttacattatttttttaaatttaacaaaatcttttcaagagtaatttgtctcgtaatgaatgtctccatttatgctgtttcccagggttactactgaaaaacaagtattttgctacttgccttgattcactattttgtaggttctttgaggagaaaaaatatatttgattttattccagagtttaaagaggaggaatttcttttatatatatgtgtgtgtgtgtgtgtgtgtgtgtgtgtgtgtgtgtatatatatatacgtgtgtgtatatatatatatacgtgtgtatatatatatacgtgtgtatatatacatatatacgtgtatatatatgtgtgtgtgtatatatatacgtatgtgtatatatatacatatatatgtatatattccacctctatctgcaaagtttcttagcatatatgtttgtatttgtgtatggggagtatatagaaatacatatataattcgtatttacatgcttttattgttgaattaatatatacatggtgaaacaaaccttggaatttttgataacgaaaaaactatattttaaattaattttaattattaacggcatagaaatcttctgtcttcaactaaaaattattgaaaatacttaataattttatcatatgagaaaataattcatattgattcaatactaccttagtgagaactatgtgattggttttggttgctctaatactttgagatccagttattcatagatgcagttctaagttcagtttatttttacattgattttaatgtctgtcaaaattgaggatacttcacaaagctataatatgtaaaatatgcaaatatgcacttaggggatggttcattcactgctaatggcaatgaatgtaaatccatatttcaataatcatgatgattcctaattttattgacttattataagatctgattagatcattgtgtggtctgggttttgtctaatgacataattggcttaccaagagcttctacctggactggaattaacaaccctaaaaatgtccttgatcatctctacccacatttagttgacctttgttctaatgtgtgggagaatcttttaaagtttgtccatatgcagaggatttattaaggtaaaactggatatttatacttaaagaggcccaaagaaattgcactttattacattacacaggaagcaaatgaacaagtggaagccacagctgtggggccatcacagacggctgaggacctctcaggacatctcgagtatcctggctaccccatagagaaccacaggagggcgccagagtcagtcagtattgtaaatatccataaatgcaattcctttcttaaataaaatttgaagtgtaccaaaatggactactttgcaccaccctgggtgtgtccatccttactttgagatactggctgaaaatagtgcattccaagtacccagggatctccttaaaatgcactttctggccgggcgcggtggctcacgtctgtaatcccagcgctttgggaggctgaggcaggccgatcacaaggtcaggagttcgggaccagcctggccaatatggtgaaaccctgtctctactaaaaatacaaaaatcagccaggcatggtggtgggtgcctatagtcccagctactctggaggctgaagcaggagaatcacttgaacccgggaggcggaggttgcagtgagccaagatcatgccactgcactccagcctgggcaactccatctaaaacaaaaacaaacaaacaaacaaacaaacaaacaaaaatgtctagggtggggcttgaaattctgcctttctaacaagctctctggtgctgcccatgttgacccactggtctcctgttaggttgcaggaatttataataaaattgctttacaagtttaattatagatgataaatatatggtgcaagcctatagtgaacaaaaccatcgtccaagatctatttacataacctgggggaggaaatgagagccaagaacaggaaaaaaaacaaccaataattttaccctaactgatattttcttggaatgtagctcctcggcaccactctatagacctttgaacgtgttttatacaatgttctgactggaagcaagctttttatgtgctgttttagtttcttaaggttgtaggtgagctcaatagcagtggagaacacagtgatgtgacagctttcttggtcacatagtactgactttctcatttttatcgatgcagtgataataatcctgatcctggcagtggtgttgaaaagattatatgaaataatatggtcaataatatctagtgtgaaccatttctatcaatcttctacatgctgttacatttagaggttttgtcattgctttctttgaactcgagctagctaaaaatatcttaactgtctcagaagcactctagaatattttagtataaatttagataaggtattgtgatggagaagagaaaacagtgattaatttccatgtgtcacatggaatagtaaaaacaaaacagaaattcatagtaagcctgcttttatattcatcctcaaagttcatgactactcactctgaattcagtgggtttcctgaaaaatagccaaccttatcaaggaatacctaatgtttacataagaatactaggggataaaacctgacaacaactaacagggcaattttatcttgaaggaatatgtaagcttagagaaggggaagaaactgaataaaaatgtgtgcttattgaagtcttgaaatacaatgaaaatgtctgatcttttctttatccccgaaaaatccataatttaagattatgttatttaaaaatagctagaatttagtcattcaacccaccatgtcataatgatgctgaaatcccaaatttcttagagacgatatcatatgatattttaataaaattctaaacaggttattttaacttttattaggagagaggaaactagccccccttcttcctccaaaaaaaaaaaactccctaaaataaccaaatatgcatgccattttcaaaagagattttagaaacattattatccctgaggtctgtttaaatggtatggagtgtataaacacagatgcacacatatatgccctttttcttgcaaaaaaaaaaaatacacttttaaaaataaaactgcctcccaaaatgcttcctttgtgatgttactaaagaaatacttagctttattccctgaataaatgttagcagcactgaagatccaacagtatgaaatcataatgaaagatactaaaaaaaattcctgctgaaataaatcatgaagttttaagaacaagtgtgaatagaatgattggattaacacaaagcaattcctcctcctattataacttttataaaaaactataggtatttgctctttctagcgtatcataaaagtgacaagcaatttgttgaagctttttaattgtattattccagtatagggaaaagaacaaacaaccattgagcaaccaatatgtgttggacactgtgtacatgtcccagatacatatctcacgtaatgctctcaaaaaatgtaggatgaaggtagaatctttaccattttatgaagaagaaagatgagattcagaaagagtaagtcatcatgttagtgtcagaaaactagcaggttgcaggtgaaggaccaaatctcagaaatatctccctgaaaagcccatgataaagctttatttttgactgataaagcaaaactagagatattaggtccatgggtaaaaagcaccaagatgaattttctatagtaatcacaccactgcagacctgttcaaccagaaatacaaaaagcatgggtgtaggagcacactgactatacattctgacccctcctccacatccttcacacatgcatgcacacacaaatcaaaaagacatgacatcaaaagaacaaaaataagatgtcctagacagagcaatcaagcaagagaaagaaataaaaggcatccaaataggaaaagaagaagtcaaactatctttcttcaatgacgatataattctatacctagaaaaccccaaagactctgccaaaaggctcctagaactgatagatgacttcagtaaggtttcaggatacaaaatcaatgtacaaaaattagtagcatttctatacactgataatgttcaaactgagagtcaaatcaaaaacacaatcccatttacaagagccacacaaaaaaagaaacatctaggaatacgggtaaccaaggtggtgaaagatccctacaataagaactacaaaaaactgctgaaaagaatcagagataacacaaataaatggaaaaatatcctatgctcgttgattggaaaagtcaatcttgttaaaatgtccatattgtccaaagcaacttacagatacaacaatattcctatcaagctcccaaagtcaattttcacagaattagaaaaactacccaaaaattcatacagaatcaaaaaagaacctgaatagccaaagcaatctttagcaaaaacaataaagttaaaggcatcacattacttgactacaaattatactctaaggctacagtaaccaaaacagcatggtacaaaaaatacacacagaccagcagaacagaatagggaatccagaaataaagctgcatatccacaaccatctgatctttgacaaaatcaacaaaaacaagcaatggggaaatgactccttattcaataaaaagtgctgggataactagctatccatatgcagaagattgaaactggacctctctcttacaccatatacaaaaattaactcaagatggattaaagatttaaatgtaaaacctcaaattataaaaatcctggaagaaaacctagaaaatactcttttcaacatcatccttggcacaaaaatgtttcgctaagtccacaaaaacaatagcaacaaaagcaaaaattaacaagagggacctaatgaaactaaagagcttctgcacagcaaaagaaattatcaataaacaacctacagaatgggagaaaatgtttgcaaactgtgcattcaacgaagttctgatatccaggatatataaggaacttaaatcaacaagcaaaaaagcaaataatcccattaaaaaatgggcaaagaacatcaacagacacttctcaaagaaagacatacacatggccaccaaatgtataaaaaatgctcaatatcaccagtcaaagaaatgcaattctttgagattcgcactgagacaccatctcacaccagtcagaatggctattactaaaaggtcaaaaacaacagatgctggtgaggctgcagagaaaagagaatgcttatacctattggtgggaatgtaaattagttcagccactgcggaaagcagtttggagatttctcaaagaacttaaaacacagctaccatttgacccagcaatcccatgactgggtatatatccaaagtaaaataaattgttctaccaaaaagacacatacatttgcatgttcattgctgctctattcaaaatgaagacatgggatcaacctaggcgcccatcattgatggatttgataaagaaaatgtggtacgtacacaccataaaatactatgcagccattaaaaagaatgaattcatgtcctttgcagacacatggatgcagctgcaggccataatcctaagtgaattaatgcagaaacagaaaaccaaatacatgttctcacatataagtaggagctaaacactgagtacacatggacataaagataagaacaatagacactgcagactagtagagaggaaagggtggagggcaggttgaaaaactgactattgggtatgacgctcactatctgggtgatgggatccatcccccaaacctcagcatcatgtaatatacccatgtaacaaacctgtacatataccccctaaaataaaagttgaaattgtttaaaaaaaaatcttaaataggctgtgaatgtagtgaagttaggtaaattcagtgaacaaataacatttgaatgaaaatctagcaattaaagagttaaaatggtaccccacttcccccagaagtttagagggatggttaaaaaatgaaattgagtctttgttatgtcttggggtgttatcctgtttctgatatttatcagcgaagatgttttgagcaatgtagccactcaaagacttacttttatgagatgtaaattatgaataacacctacttcacatagctgttgtaaagagtaaaaattttaatgtatggcaatatttcatagaacctctgaaacatagaaatgctcaataattggcagagtgtttgttttattttgtttataatcagagttttaggctaaaattccaatgcaaaagaagctaatttgggctattaggatgctatcaagagatttttatcccatagatgaaaaaaaatggatttctatgaaaaaagaacaaaaaattgtttgaaataggatgaacacaaaacaatagtacatgaaacagcctacttacattataaaatggcaatcacccttgaattctagctgcaacagataaacattaaattatcatcataaaaccaaaataaactacaaatgttatctgaaggagagaggtggaacttgctcattaaatgtggcttatcaatctcaatgtgtccacttataatatgtgcaggagattataccgccgagaggggagaaaaagggggctatgtatgtccccagagcgctgctgttaaagctagaattcactaaatatcattcatccacttcataattcatccaaaggaactctaagccaaataattttgcatcttattttaaggaataaatagtaatggcttttgaaaatcttagtttctcaaaataaaaaccatacacgtgattggctggcaaatgccaaagtttttcctggcaaccctctgcctccctgggggagttcaagtttctccacgctcattgagatctctaccatcaccttatccttacccagcacaaaatatcaaatctgtatcaagggacaaatacagccgtcaagggttcataatgaaactgttatacaaggttgtgaagcttttggtgtgaggatgaaataagagccaaagttcacatcttctgcttgtttcttcttccccaaaattcagctggatgactgagaaggaccagggggggtagaggtttaagaaagacactactcttttgaaagttcaagagaagacagaagaggagggcaaagggatcttcaaagttcacctaaggggctgggcccctcaactagggcttgagtacttaatgaagcctacatatttccaaagggttccatggtgtacagctatgatcaagcattcttaatctactctctgttttcgagcaacaagacaaatctttgtgaaaactggtttcatcctttggctacaagagatgttcggctgttcaatgaagtgggaagggaagagataatgcctctttctacatagaatttgttaggtgtagattcctctatatgcttcttgatgccttttcacccctgtctttcttttccttcttatggcatttatttcacacacccatatcttctaattaggtaaactctgaaactgaaaatattttctttaaaagtaaataaataaaacatgtccctttgcagctcctgctatgcagctatgcccactgtctctctcctggttgatgctcaccactgattttatgctgtcaggcattccattcacacagagtttaggttcttatccttagtggcactggcccatcaaggagttttatttttacccaaaccccttaatatctttatctctaaagacattttccttctcctaaagatgttctctatctttcacttacgtcacctgcaactatggccataatctaccagcctataactgctgcctccaaaatccctaaatcaaggctcctgattttttatcacaaaattatatcatttctagactaacttctagtatacttatgagaactctttaatatggaagagatgtgtgtatgtttaaaagccagtgaaaatggtccatttgtttgaggccagctgaagctacaagaaaacaaagataccagctgataaggtaaaagtctagtctatcaacacctctaacctctcttagcccatcagacctcccaattcatcactctatagattccatgagccataaatttagtactttattttctgagccgtgaaaccttttctccctttgtctttgcacccgtttagcaaaagtctagctccagttgatctcctttgctttctcttctcatgcctatgttaaacataggagactatcaaaaaaccattccatccacctgtgccttggatcctgtcttttctcatcttcccattaatttgtgctattatctatatcttcctccttttgtatatttaacctctcctattgacttctaaacaggctcacatttctctcatcctaaaaagaaagttaaactcaagctctcattccccaactgctttcctgtctctttttcactcttcaaatgcaaatctcttaaaaaatttgccttcacccactgatttcattttctcacctacctctcactccccacccacgccaatatgacttccattcccaccactcaaccaaatagctccaagctcactaatgtttccattctgataaatttgatggtattttggggtagcaaaataccttcaaataccttccagacagtgtcttctatgaggttccatgttttctagaatggtattttggggtagcaaaatgtttcctggaatggtattttggggtagcaaaataccatcaaataccttccagacagtgtcttctatgaggttccatgttttctggtccctcccatcatgcaaattcatgtgcaaattgtacttcctcattccttaggttccaggagagtggctttctttcaggtccgtaagcctgccaagctccttcttgccacagatctggtgctctttacccggaatgttctcaatattctcctcctatgttaattagttgatccttctcagccttctgatctctatctaaatattgttccttctgggagtacttctctgacctaaatcagagaaatatttattatgaaaatgaccaattataaaattagtctttttgcaattcagttcctttcattatctgcttggcttttaatacttgaaattttatatttatattttattactttctatttatgattataggataattttattaaggtttgttaaactataaggtccatgaaggcaggtgaaattactgctttcatattactgcattctcagttattagcagagttcctggcacacagtaggtactcagaaatactttttaaatgcatatttgtcaagacaggatagagccagatgatatccaaagtttctcatttctaccaaatggataactttaagatatagatttttattttaacattgtttatgatatttattgagtttcaggcttccaggtctatattattctaaaattaatatacttacttaaatttatttaactttttgtttttatttttgttccagtggcatttgattttttaagttttttgttttttaataattataaaattatttttaaatcaattccatttagttgtcatccatctctcagaaagtcttattttttctttcaaattaatatcttgcctttaattctataatagtaaaagtgatcatctgtatcaggaatttaatactttggtggtaactagcaaatgttactctgctcctctacacccctaggtctttatttcaattagtataatatgctcattaaactaagacatctattatgttgccagcattcacataacagatggaaaaatgtctcatatgggtcaattggaataattttgctaaattaacattgtagccttttataagagggtcttagtagctactgttattaacagaaatagggcataaattgaaatgaggttttttatgtttggcctactctgggtagatttttaattgacaagtctgtgtagatgccagctatgctttcaaaacataccttactcatgcacccatagagccatttgccaatttgtacagtattaaggatcatgcatttttacctggctcactataaaatagagtaaagttcctaatgataacttcagaaatactatctattttacctgaatacctgaaatggtctttacaccttttgggtcaaaagatatccctgaacaaaaggcctcttttccaccttccaggaatatcctaattctatatgattcagcccctacccaaggcaccttgtttcactcttccttggccaacatggtgaccctccactggtcagctcaccggtcaggctttaataacagaaataaaataaatcaacaatgattagcgaccacctgtactctacttagccctgctctactttcttactagtgtagccaagaccaagtcacctgctctctcctcctttgttttctcaactttaaaacctaccctaactcacacagtcattatgaatatttaatgtgtgaacacagtaagatttttaaaggcatttgacaaatggatttcacttgtgttgtgacccatacacatttccattcactggctagcttgagcccaggtgacccacttgcccgcccacctgtactcttcctctcctccatgttgctcctcaatgaattaaccttccctaaagcactactcaggtagcacttcaccaatgcaaagcttttagtgatgctccataacctaaaaagtgagtaaaaatcccacaatctaaccccgttcctaccacatatccccatcctcccatattttgacgccaaaaaatatgtcgatacaatgggcggggatagtcattagtgctgaggggagggactcgagaaaactaattttacaattagtcatttcttaataaatatttctctgttttgatggcctttggtcagcttttgctggctgccttcccagaaattgactgtgatttggacctgggaagatatccagaagaactagtgaaagattatcagagagcagaaaacaaaacaccttgtctaagagtctcttatttctaccatatagagtatacttttattatataatcttaaaaatactcccataaagcttattaagctaaggcaatagctcatatttggcaaccaagatgaactaacctaaatgaccagtgagaaaagttgagcaccaagacctcctgaggtcattggctaaaggagaaacttcatgccccatagaggtggacagcacccctcatagatgccccagaagagtgtctgagttctccagtgagaacacatggacacagggaggggagcatcacacaccggggcctgtcagggggtgggggagtcaaggagagggagagcattaggacaaatacctaatgcatgtggggcttaaaacccagatgacgggttgatgggtgcagcaaaccaccatggcacatgtattcctatgtaacaagcctgcacgttctgcacatgtatcccaggacttaaagtgtaataaaaataatcatcatcataaaaagaaagaaaaatggataggtatagcaagagggttgaatggaagtggacacctgtgttgggtagtcagaggacattagaggaaccttgagagcctcagaaggggaggtgaccgaactggaagagggtgttgtccacagactgcctggaaaaagatacctatagctaagattggactagttgtacccatgatcattgtgccagggactgtgatagcttaggtcaccgtagtatgagaatgcccttcatcactgctgcagcccatgaaggcttccaaataattctgctctctgctgcctccagctgcagcacaagggagctaggtcagagacaacttgaacagttcacaaaacattgttatgaagatgaaatgaaaaccaggcaacaagtatattctcttagcttgtgttggccaattgtttgcttatgggggaatgacttttgaagacttgatctagagatggaatccacagtcctctttctcatttcatccaaactgagtctgctgttttgtgttttatttatagagcagtcaggttcctttcttccctgaagccaacctagtacctagggcactaagattatgttaagaggcttttgtgtgctaatgtgctaattcaaggctgatggaagtgaatttttatcataataatgtgaataaaatacatttttctgaaaaaaaaaagtgagttctcaccaaaaccagtggaaggagcccatgatccaccaaacagggacttctcagctacaaatgggaacgtttgtgtctccagctgggctgcagctccacctgcagaatgaggaggaagggaccacaaagtaaacaggtgatagtcattactaacatttccatcatctgcttttcctctcaatggccagttaacacaagatgtcctcttgcacagatgcagaatctcataagccatcaactttaccctgaatagaagtaaaaaggtctttattcatttttcctcccccctaaatttattaaatacctgatagatgtcaaacactgttaggtatgaagatacagtcatgagtgaagcatgttcttggaaagaagacatagcccagctctccatagaaatgaaatacagcaataatatatgtatttataataggttaatgggtttttttgtctacaaaaaaaaacaaatttttctatcacttagcaaagtgactaggtcattttacttttttgaacttgattatttggctaatattataaaatgccagagctaaaaatagctgtacctggggtgaaatggagaagacgtgggacatagctttaaaaatgggagaagcgctttttcccaagcggctgccgaagatggcggaggtgcaggtcctggtgctcgatggtcgaggccatctcctggtccgcctggcggccatcgtggctaaacaggtactgctgggccggaaagtggtggtcgtacgctgcgaaggcatcaacatttctggcaatttctacagaaacaagttgaagtacctggctttcctccgcaagcggatgaacacccacctttcccgaggtccctaccacttccgggccccccagccgcatcttctggcggaccgtgcgaggtatgccgccccacaagaccaagcgaggccaggcttctctggaccgcctcaaggtgtttgaccgcatcccaccgccctacgacaagaaaaagcggatggtgttcctgctccctcaaggttgtgcgtctgaagcctacaagaaagtttgcctatctggggcgcctggctcacgaggttggctggaagtaccaggcagtgacagccaccctggaggagaagaggaaagagaaagccaagatccactaccggaagaagaaacagctcatgaggctacggaaacaggccgagaagaacatggagaagaaaattgacaaatacacagaggtcctcaagacccacagactcctggtctgagcccaataaagactgttaattcctcatgcgtggcctgcccttcctccatcgtcgccctggaatgtacgggacccaggggcagcagcagtccaggcgccacaggcagcctcggacacaggaagctgggagcaaggaaagggtcttagtcactgcctcccgaagttgcttgaaagcactcggagaactgtgcaggtgtcatttatctatgaccaataggaagagcaaccagttactattagtgaaagggagccagaagactgattggagggccctatcttgtgagcggggcgtctgttggactttccacctggtcatatactctgcagctgttagaatgtgcaaggacttggggacagtatgagcttgctgttgtacacagggtatttctagaagcagaaatagactgggaagatgcacaaccaaggggttacaggcatcgcccgtgctcacctgtattttgtaatcagaaataaattgcttttaaagaaaaaaataaaataaaaatgggagaagcgggaactagggactttccatttaaccacgatgtatggtgagtgattgattccatttataacacactctagaaatgacagaagttatagatatggaaaacaaattagtggttctcaggggttagagattgtggggagtaggaggatgaacactataaagaggtagcataaaggaggttgtgatgatgggatagtcctctatcttgcttatgatggtttttacacaaatccacaatgctgataaaaggacatctcactcataggtgataaaatggcaacattgtaccagtgtcaaattcccggttttgacatgtgctattgttacataaggtgtagtcattgaggaaactgcaggaagggggcgtgagacccgtccatactatctcaactccctgtgaatctataattatttcaaaattaaaagatattttttaaaaaggaaacaagcattagggactttccatggaaacatcggttaaacattggtatagaaaccagatctacttttaattgaaatcagacgtggctcttagagtgttgggcacataaacaggtgtctccatctctttaacattgacgagggaagtatgctgcacgcataaaggaccacctggtcagctggttggtgttacatccttgataatatgagactaaacctaatgtttagaagagaaagcaaatagcttgaagccagccacctaacagattctgttgcttctaatttctatcatatagtttctgattattaccttaggtaaaataagaaatatctcaattaaaaattcaaaaacttttctttggaaattgttaaaagtggaaccattaaagtcagacaaattagatcagacacaaaagtttaagatatgcagaaatttttcaggctaatggcctaaagtacctcttgagcttttcttatcatcaatgtctatggttatattatttctgttgaggtaaaattatctacataatgctattacctaggtctcctgtgtataaggataacggaaagtgcttccacgctttgcaaatacattatggtctgaaagaatattaacattttgtctatataagttcctaatgggaatatttctacaacactaaaataattactcaaaatggctctctactcataattgcaacaaattttataaaattacagatttgaggatatattactatatattgtatcttgcgttgttaagatactagacattctgattcagtttaaatgttcatcaagtttacgcatatttttatgtgtatctatgatttaaagaaagacaaagtgataaaatagatcattgaataaactatctagtccactctacaaaatagtacacctgttatatctcagcttaaaataattatataactagttacatcctgtaatttgctaacacagtttttgactacctacaggatatgttctgtggattcatttttataagccatagctgttcggacccaatgactaatagcttccgtaagtgaaaattcagaactagagccagaaaagaaatacaacatctctagtactctaaaggtacttagaggatgtacactttggggtatgcaggtgtgaggagccagtgggataatagtagaaggcttctttttagcctcaggatcaagccacattccccaacatgtttgcaaaataccttgtaatttgaaggtttttttcttttttgagacggagtcttgcactgttgcccacgctggagtgccgtggcccgatctcggctcactgcaagctccgtctcttgggttcacgccattctcctgcctcagcctcccgagtagctgggactacaggcgcccaccaacacgcccggctagttttttgtacttttagtagagacagggtttctccgtattagccaggatggtctctatctcctgacctcgtgatccgcccacctcggcctcccaaagtactgggattacagccgtgagccactgcgcccggccgagggatttttttttaaaggtaccggtatgcttcttcaccatgtcattctggtgtctattgctctagtaagttagaaccatgggaaaacgaaagcattagtccataactaatacttgtccatagcagaattagtatctgccaaaccccaaaaccatcctactcaaatacaaggtgtacacataaaatttgacaatatctttaagaatcatttgaaacataataaaatagaaacatttttggtaaacatttcaggttacatgtctttctgtttttaaaaactctaaaaacgggtcataatttctataggtagacgttctttaatcaaatcaatcaatccattttattcagataccctatatctagtactagttcagaaaattcatttttctttatcaacaaataaaaattatatgtatatattacgtacaacatgatgtttttctacaggtatatgttgtgggatggctaaatcaagctaattaacatatccattacatcacatacttattttttgtgatgagaatatgtaaaatctactcttagtaattttcaagtatacgatatatagttatttactaaaatcaccatattatacaaagaatttatacagaaaatcttttgtaaataaatactaactcaataaatgcaattaagtggcatactttttgaaaatgtctgaccagtgaggaaatagataaataaaatgtgacatagaatataatagatttctttaggacaagtaaaaaataaaaatttcatatcaagatggatataatacaaaagtataaaatgtggaggaagcatatttcagaatatgtgaagatatgctacaatttgtataaaattttaaatcataccaacatcatattttatactgctcatgaatactgtttgcattaaataataaaaaatagaaaataaaacattaaatttatgataaaagctttctttaaaaaaggagaaaaaataaattaaggatggcagcttaagggcacttcagatttatctgtaatatattttagtaatttaaaacacataataaactttttgtggaaaacaaaattcaggtatagtttatgttcatcaagaaatgaaaattatcgtttaacaaatttcttcttacatttcatcttatactttttttagggaccatctgtgattatttatgaaccaaaagaaacaaagtgtttcataaactatacagacaaagtctgcttttggtctatatttttttatgagaacaccatgactaatctgacagaatatgcagtataagaagtattttcttatagttatttctactattcttttctttctcatgaaaggactcactgaaattgtgcaggatggatggaatccctgccactaaactcctacacatcaaaaacaaacgtgtaattcagtaaaatggaagctggtgagtctgtgcttcctgccaaccccagggaagatccaagtttcttttgtgatactgtacaactcactgcttcttcaggaggtatcatcaacagaggtcttgtgcactctgaaaataagaatgccagcccagagtcacagcaggctttttctttccagaatttctacctcaagaacagactcatgaggaccacagcggtcttggtaagagacctcttcttttggaaaaaactcataccttggttttatacactgtactagcctctcatggggttctgttatctacatcccctctcaaaggctatcttccattacatagttaaccctggaccccgagtctagactgaactgtgagtcctcaaattttgttttcatgtccaccgataagccctatctgtctagactacacagctatgaaatactacaaaaatctcagtcaatttccaaatcttgaacacaaatctattccatgcaactcatgtgtcatgcatattttactgtattcttatcctctgaaagttagttgtgttttaaaacacgtaggaaaattctctcttaaccaaattattttagcaaaatattatacacatatttgcaaacattgcacacatttatgctgcttaaacagtgactgactaataagcaagaactagagtagactctatccagccagccaaacgccagctctccctaagtgctctgcttgtggctctgtccaccttctgactctgctgtctctactctttatcatacgtcttctagttttccggagagagatgttctagatatgtaccttctgatttaagaaaaaagcacctctatctctgccaattgtaaaaattgacagcaatatatcatatccatcattgttataaaaatactgtgtatatcaaaatatactactcccctttgttatgctgatgatatctggttgccctctataaagggacaagggtttctataaccacaagcctgcttcgccacatgcccctcttccttgaataagaaaggttcagaccatgagtcgactagaccccaacactcagttgtcccaagaggcatgattgagggtagaaggaatagcagagacagcatatgcacaaccatttttagaactttggcaacaggtagtttaggtgagcttttgaaaggtgcatagaggctcccgctcagtctttcacctgtgtctcagtattatgaaggcaattctgtttggtttgtgttttgttttggcagtgctacaaaggacctcaacacttccagccaaggcaggacccctctaatgaaaaaatatttgtcctgagggccccccttggggtggcagagacactgatgtgtcagttgagatttatgacaatgatgtaaagcagagaaaagaccatgcagggttggctcacaaaactgttggtggagttggggggaaaggacaggccactgggctgctgccattgctaggagtgggagaaagattcaatcgagaacttattgagtgcctactatgtggcaggaacttaacggaagtgatcatctcctagttcttatggtcactttttgaaatggttactactatccatattttatggatcaaattttccaaatatttattcacaccttatgtgacatatactgcaccatgaagttatctgtcttaaaagtgagaactggctgggcatggtggctcatgcctgtaatcccagcactttgggaggctgaggcgggtggatcacttgaggccaggagttcaagaccagcctggccaacatggtgagacctgtctctactaaaaatacaaaaaaattagcctgtcgtggtagtgcatgcttgtggtcccagctacttgggagggtgaggcaggaggatcacttgaacctgggagactggaggttgctgtgagccaggattgctccactgcactccagcctgggtgacagagtgagactctgtctcaaaaaaaaaaaaaaaaaaagtgagaactaacaataaaattcctagcccccaaggatggaatgaacccctctcttagccaatgggaccccagggaaatattaaaaactgaattcctagccatgatggaatgggagttcaaacatgtttcatgataccctcctttttgtggtttagacatgaaaactgaccagcattaacactgaaacagatcataagactgatggaacagactctttgtggcaataagataccaaattataaagacctaacaccataccaggcaagggttaagtcacacacccctacacttaaagaataaattctgttctaactgccaccagatttctttttccatagtggctaaacgagcatcggcctcaagataagcaatattaaaaacaattatagctcatccaccaccagacgcagactaactccctgttccacaagccgtaactatagctttgattgaaccagaagctgatttcagtaactttcttctgataagaggccactaactataggatggttctggccagtttacagaggctgcatgctagagtgcctcgtttttttcgcttcacttttttgacccaattgtaatgcatttaaaggtgaagtctccactcccaacgtgaaatgggacacatgtaacatgcatgtttattcaatatgcatgcatcaggatcttctttgtaaatattcatagcttctcctataactgttgaatatatatgtgtagccaacctgtttagcgtaaagctcctgccccaaccccccctcctatgcagtgcctgttaacagtctctgctggaggctacacttcccagcctggcaggatggctaccctgcagtctgtaaccctttataaaaaataaagtctcctttccaaagtacataggcaattgaagtagaatataataagtgatatgaagtatagagaaaatgatcacctgtctagctggaggattgagagtaggcttctaagataacatccaaactgactcttgaagcataagaaacccattttacctgggattatccagttgaaaaaccaaggcaggggcagccaggaaactccatgtacaaattagagaaaacaaagtttaagtctcagtttccttataaaagttaggaccaggatttaaactcagctttgactccaaagattgtgtttattctacttccaccaaaatttagaaaggaaaatggtagtagatgcatatacaactgcctctccatccttcacaggtgtatctagagccaactctcaccactgtgattttccaggacatggttttcttaccctgttgctcccatgaagaacaaaatgcagtttgaactagttgacaacagtaacatagagagttctgaagtacttttttgactgccaaagctcccctgatgggagttggcagcagaaatactttctgggttagacaattactggtagtaaagaatccctgaaggttacacctaactccagttatgccattacttacaccgaatgttgacctacccatgtataataggcagcaaagaaatattttttagttagtgactgagagctcttttcatacaatattatagttctcatatttttaacaattattactgattgttctaattttaaatagttgtttaaatttcatagaataaaatatgtgtcaccttgccagaataacgaatatggttttatgattcagtgtttagctaatgcaaaatacctcctcgagactcaccccaaatgtttcaggaaggaatccaaacaatttttattaggaaatgacaacatgtaactagaatgtaaaattaaggaacttacaataaagcaagcttcagtgcaatcacttatttcagcagttgatggattctattagcagagtcgttttggcactggtttccaggtggagcatgattaatcattactcctgcaaggcactcattcatcattacccaagtaaataaatatttttacatctttaattttaatacctaaatcaaccagaaagaaattagtctatttacttgggggtgagagaactctgtagaaatgaaggtctgtgttgattgactaggaaggaatccagtaccacatcagcagcgtagcccaggaatgggaagcagagatcacagctctgactcatgttcgatatgaggtggcccagagctcccagtgtttctgaggctgactcagaactctgagtaggactgtggtgagccaacagtcgccatggaatatgaacgagacacatgggttttgatgtgatgtgacctcatgtgatgtggtgtagctggaagggcctcctggcacagtgctgggcccagacttgggggtcaggacctgtcagatgaattagcttctgaaagagtcagccatgctgccagcaaacactgtgggtgggcttggtatagaggatcgcctggtcagtggttctcaaactcgagcatgtcagaatgaactggtctgctggttaaaaatgcagatttcagaccaggtgcagtggttcacatctgtactctcagcactttgggaggccgaggcaggtggatcacttgaggccaggagtaagagaccagcctgggcagcatagtgagaccctgtctgaacaaaaaaatttaaaataaattagctgggtatggtggtgcttgcctatagttctagctacttgggagactgaggcaggaggaccacttgaacctacgaatgaggcattacaatgagccgtaatcacactactgaactgtagcctgggtgagagtgagaacatgtctcaaaaagaaatgaagattctctggcccaatcccagaagttcagattcagtaagatagggatggaactcagaaatgcgcatttttaaaacttacagtgtaggtttctgatgagaaagcatagtctaggaggtaatgaaataaataagataaataccttaaattctacctggcaggatgaacaataatatataaaatccaacaaataaggtttcatggcataagtacaaagaaagaaatttgccattaccaccctctcactctggctacactataggtaagtgtaagcgcctcatatgttgtttccaattttcagaggctattaagaaattactaataagatcttacatttatattttaattcaaaaattttcatttactttaatataccagttgagtgcataacaggcagttctcttgtagtggaaaaggtatcatatcagatactaaaggaaaaaaactgaattcaaatcacaatttcatttctggctaaatttatcatattgatatgtgataaagcaactcaatttctttgacttaaatcttggaataatattacctgtggagaatgatcgttataagaattaagtgaaaagcgtataaaagctctgatgatcgtacctggtatatagagaaatctctgaaatttttttgtctagatggatgaatgaacaaacacacacttgagtggatgagaaacttttttgaaattaagtgaatgatgaaaatattggcaaacatgacatgttagctttcaatttagtggcaaacatgatgaattctttcattattttaattaccaattacttccttgtctcagtgtatttttacccactagaatcacaagtgacatcattccttatttttatcctgctttgctttgatttcttacatagccttgatgtaaatcatttaaaaatcccatttaaaccacagaccagcagagcctggcagcctttggatttagtgctgttgaaccatacaggaaaactaatttgttcctttggttttcattttgtgcatccttcccatcttattcactacttttattaatttctagagcatggtctgtgagtagctccacagaagttcgcaattacgtggagctgtcttccatgttaactcttcaaatggcttcatttataggcacagctgtctcatctcgacttcactgggagagaggcagaactagcatttcctgtctcacagcccatttattttcagacacgtgttgcagcatacattaagttcaatttctgtggagctgttatcaaggtatagaaccatgcacagttggatggcaccattccctccaaaagggacaagaacgaataatgtagaagaaatggacagacataggaaaaggtaaattttccaatcactgacatccagcacatgctgtggaaaagaacaggctgtgtgaattagaggtggatggcacttgtgtatttataaacaatttcacacacatcatttgatagtctatgctatgacataggtattatcatagtccttattttagagatgagaaaatggaagcacaacagggttgtgtaaattgctcaaagtcacacagttggcaaactgcatagcagaaattggaaatcacttttatctaacaccaaatccgagatttcttccaaaatgatcgtatttctccatattcagatgtgactctagggttagcagaatccttaggtagaagggaaggggaggcatatccaagacaaatgcagtttttcaaagtcaacctgcataatctgatttaaacaaacccccccccccgcccatcacattatgctcaaaggcattctgtgggtcttaccttcttaatttattgctagtcggtaaccacaggagattcactttttcagatgctcactgttaccttctttcttttgtcacagtcaactgacactaccaaagccgtcagtattgggggatcattggctttagccttacttggttgaattcctttgtacctgaagggtctgaagttcattaggttgcagcaattgctttttacagaggcattgtttcacacaattgaaattttacttagtacataatagcatttgcctaagtaaactttgaataatctctagttcaaagaattctacagttaaaatgcccacacacacaaccctccctcttaaaatggctggaataggttcattattatattttagtgcatgcaaacaacagttaaatgccaaaatagaaacatgttcacccaaaggatgacatgccctgcattcttgtgtaaatctcaaaggatcttgtttaccttctttttttgtggtctagaaaggtccttatataagtgaactacagacttctctgtcctcagctgagactcctttactgaatgtttgattaagcaccttaaatacattttccaggttcaagaaactgctgaacacaccaggtataatgagctcaagcattgtgggatcaagatgaaacctcaaacacatgggaaatgcaactaatgctgacatctgtagcaaaggaaattcctcctgctccccacccctcctcctcctcctccccctcctcctccccctctcccacccctcctcctctccccacccctcctcctcctcctcccactcctcccccttctcctccccctcccttcctcctcctcctccccatcctcttcctactccccctcccctcccctcctcctcctcctcctcttcccactccttctcctccccctcccattccccctcctcctcctccttcccctcccctttcccctccccctccttcccctcccctttcccctccccctcctctcctcacactactacctatgcccagagtggaggatgcattttgggacctctcacttccagcctctctccccacccacttctgctcctcacccaccacttcttaactcctccacaagaaagaagttgctggttgtcagaaatggagatgatcgtaggcacattatactaagtaccttaaggagtatccacgagagctctctgctttttccccctacttttaagcagacccaggcaaatctgactttccagaattcattctgtctctgtcaatctcttccctttctttccttgtgagcacgcaatcgaacacagtagttcctacttacgttcaaggggtacgttccaaacccctaagcttgaaaccacagatagcacaaaccttgtatgcgtgatgctttttcctgtacgtatatatctacaaaaatgtttattttataaattaggcacaataagagtttaacaacaataactaataatcaattataacaacatgccagcctcactactcttggctttgggaccattacgatgtaaaataagggttacttgaacaccagcactgcaatatccccgcagctgatctggtaacctagaaggctaccaggtgactcacagatggggagcatgttcagcgtggatcaccaggaaaaaggggtgatgccggccccgggcaaggtgcagtgagacggcacaagatttcatcacgctactcagagtggcacacaatttaaaacttaggaattgtttatttctggaattttccatttaatatttttggacatccattaaccataggtaactgaaaccgcagaaagcaaaacttcagattgggagctcctactgtagtattagatccagaagaaaagaagtcctttctttgacttagctaatgagcctgtattgagagcgagtaataaattgtcactttcttctccttttctcaccactaatccttcagttacctatttaatacaacacccgtcagggagaaattctaagtggtaaagttgtttccactcattcctgagacttcagttagtacctttaaaatatacacaaaccttccaatcttcagtataattactatacttgattctattcaatcaatcaatcaatcaatcactgggccaactgctaattgtaaaaccccaaaatgaaggaaaatgaatatatcatgggagttcactaagagatattgaaggcaaattcacatgcatcctgtgaatggccttttaatttcaatatttccacattccttttattgagtgggtattacctacgtcatcacttcttcaataatttttttaattttcattcatattttttatttttattttttattttgggggtacatgtgataatttaatacattcatataatttgtaaaaatcaaatagtgtaattgggatatctatcatgttaagtatttgtcttttctttatgctagaaacattcattctcttctagttattttgaaacctacggtagattattgtaatctgtagtcaccctactgacctatcaaatgctagatcttatgtttaatcagactgtatatttgtattcatttaaaaaacctctcttcatctccccatttcccctacccttccttcttgacctctgataaccataaatgtcatatatggcctttattattttgaggtatgttccttctatatccagtttgttgggagtttttatcataaaggaattttgaattttattgaatgcattttcagcatcaattgagatgattatatggtttcgttcttgattctgtgagtgtgatgtatcacatttattgatttgcatatgttgaaccgtccttgcaccctgaaattaattccacctgaccatggtgaatgatctttttaatatgctattgaattcagtctgctagtattttgttgatgatgtttatatctatgttcaccagtgccactggccagcagtttccttttttgtttttctttgtctggttttggtatgaggggaatgctgacctcatagaatgagtttggaagtatttcttcctcttccatttttttgaagaatttgagtagaattggtattagtccttctttaaatattttgtaaattttaggagtgaagccctcaggtcctggacttttccttgaggggagactttttattacagcttcaatcttgttactcattgttggtttgtttaagttttctatttcttcatggttcaatcttggtaagaggtatgtgtacaggaattatttatttcctctaggttttacaatttattggtgtatagttgttcataatattcctctaatgattctttgtgtttatatcatctcatttaataatgtctcctttatcatttctgatttgaattctttgagtgttcactctttttttccttagtctagctaaaggtatgtcaattttgtttatctttctaaagaatcaacttttcatttcactgatcttatttttttctcaattttatttatttatgttctaatctttatcagttctttccttctactaatttggggtttggtttattcttactcttctagttccttgacacgaattattggcttgtttatttgaagtctttctacttttttgatatcggtgtttattgatttaagctcttcttttagtactgcttttgttatatctcataggttttggtatgttgtattttcatttttgtttgtttagggaaattttttaaattttcttcttaatttattgacttggtcattcataagcatgttgtttaatttccatatgtctgtatgttttctgaggttcttcttgttattgatttcttgattagctcaattgtggatagataagataattgataagatttctgcctttttaaatttgttgggacttgttttgtggcctaagatatggtatattctggtgaatgtttcatgtgctgatgaaaacaatgtgtattctgcagcagatgggtgaaatgttttataaatgtcaggccccttggtctagtgtgtagtttaactccacatgtgcttgttgatttctgtctagataattctgtccattactgagagtggagtgttcaaattttctactattattgtattgtaatctatgactcactttagatttattaacatttgctttacatacttaggaactccaatattgggtacatagatatttataattgttatatccttttgcttaactgacacctttatcattacatagtgaccttctttgtctctttttacagtctttaattgtggtctattttatccaatataagtacagctacttgcttttttggtttccagttacatgaaatatctttttctatccctttactttcaatctatgtgtgtcttcataggtgtggtgagtttcttgtaggcaacatatatgtgggccctgtttccttattattcagccactctatgccttttaatttgggaattgagtccattgacattcagtgttattttttgtaaacaaagacttactgttgccatttcttgctttttttctgtttgttttgagatttctctctctctttccatgtttcataatgtcttcctttgtggttaagtgatttccttttcctctggtagtatgctttattttgttgcctttttttttcagtgaatctactataggtgtctgcattatggttaccatgaggcttgccaataacatcttatagatataacaagttatttttaaaagatgacaacttaaatcataaagaaaagaatggaaaaaaagaaaaataaaaaaaattgtgcattttttaaactcaaccctcccatatttttagttttgttggctttatttacccacctttatgttacctaccttttaacaggttgctatagctattattgtttttgacagatttgtcttttgggcttcatactaaacttatgagtgagttgcacaccacaattacaatatttgatgatcctgggtttgtctgtggactagtttaaccagtgggttttatactttttgaaaagttttcttctgcacattagtgtatttttctttcagatcgaagaacacattttaccatttcttgtaagatgggtatgctggtgacacattctctcggcttttgtttgtctgggaaagactttatctctcctttatatttgaaggatagttttgtggatacagtattcttgggtgacaggatgtttttctttcagcactttgaaaatgttgttctattaacgttcttcacagaactagaaaaaattactttaaaattcatatggaacaaaaaaaaaaatagcctgaatagccaaggcaatcctaagcaagaagaacaaagctagaggtatcacattacccaattcaaactacaccacagggctacagtaaccaaaacagcatggtactggtacaaaaacagacacatggatgaatgaaacataatagagagcccagaaatagggatacatacctatggccatctgatctttgacaaagctgacaaaaacaaggcaatggggaaaagactccttattcaataaataattctgggataactggctagccatatacagaagattgaaaccagaccccttccttataccatatacaaaaatcaactaaagataaattaaagacttaagttaaaacccaaaactatatgaaccctggaagacaacctagacaataccgttctggacataggaatgagcaaagattttatgacaaaggtgcaaaaagtaattgcaacaaaagcaaaaattgacaaatgggacctaattaaacttcagagcttctgcacagcaaaagaaactatcaacagagtaaacatacaacctacagaatgggagaaaatttttgcaaactatacatttgacaaaggtctagtatctagcatctataagaaacttaaacacatttacaagagaaaaacaaccctattaaaaagtaggcaaaggacaggaacagacacttttcaatagaagacatatatgcagccaacaagcatatgaagaaaatctcactatccctgatcattaaagaaatataaatcaaaaccacaatgagacatcacctcacaccagtcagaatggctattattaaaaagtcaaaaaactatagatgctgtcaaggatgtggacaaaaaggaacacttatacactattggtaggagtgtaaattagttcaactattgtggaaagcagtatggtgattcctcaaagagctaaaagcagaaccaccattggacgcagcaattccattactgggtttatacccagaagcatatacatcattctaccataaagacacatacatgtgaatgttcactgctgcactattcacaatagcaaagatgtggaatcaacctaaatgcccaaccacaacagtttggataaagaaaatgtggtacatatacaccacagaatactatgcagccgtaaaaaagaatgagttaatgtcttttgtgtgaacactgaaggagctggaggctattatcctaggcaaactaatgcagaaacaggaaaccaaatactccatgttctcacttgtaagtgggagctaaatgatgagaactcatgaacacaaagaagggaataacagacaccggggtctacttggggatggagggcgggagaagggagaggagcagaaaagaagactactgggcactgggcttagtacccgggtgatgaaatcatccgcacaacaaacccttgtgacatgagtttacctatgtaacaaaccttcagatgtaccccaaaacctaaactaaaagttatttaaaaaatattgttccactccctcacagcctgtatgattttcactgacaggtttgttaggcaaattggagctcctttatacgttatttgcttctctgctttcaggattctctctgtccttgacatttgaaagtttgatcgtaatatgacttttggtagtcttatttaggtcagacacctatttggtgttctctgaccttcctgtacttagatattttcctctttatttagttttggaaggttttctgttattgtgtatttaaataagctttccactctttcctcttgctcaactccctcttgaacaccaataattcttgggtttagtctttcaagttaaatttctatttctttttggtgattatttctttatatcctttttcttttttctcgtctgtgtattttcaaatagcctatctttgaactcactgattctttcctctgcttaagccattctgctgcttctaatgaatttttgattcagcaaatgtatttcccagttccaagatttctgtctgtttgtttttattagttcaatctcattattaaatctctctggtaaatttctgaattgtttttctgtgttatcctggagattactgagtttccctaaaactgctattttgaattcttggtcagagtgatcacatatcagcatctagttagagtcagttgctggatcctggctttgttcctttggagaaatgatggttccctatttgctattgtttcttgtggatatatgtctatgcctttgcattgaaggatttattatttattctagtctttttgtctaagttgttcgggtttttattggatatgtttgcttagagatgctttgtaatttctctgttgattttctttttcctctgcttggtcactgcttcttttcagtactagatggtgtcttacacccaagtctcccttgattctaggaaacaatcagagtgctgccatctcaaatgagagaggtcacaaaggagatacttaatagtattagaatggtgcctgtgcctaaagattcacgcccagtgacctgtggaacaaaccttttacagtttgatgctgctgaacagccactctgatttgccatctctttgaccaagttgcagagcagagcttcctgggctaagaacagtagtccagcctctcctctttgtctctaactgtcttccaggatatttctccctttaggtactcccaatgcttcctgtgggttgaggcagggacagttaccctgccaaagaacctgggattatggagaagcttgttatcaccttgatcgcactttttccagtatagaaactgtgagttgggaaaattttccacatgcttggtgttgggcagatgggaggatggatgtcatgaatatgaaggtccaattctcttactgttttcttagagttttttcacttctctgtggccccaggaacatctcagcctcatatttgagttctgagatattgctggtgataatcttcgtactgcatatttgtttttggtattctatggggaaaagtaaggccagtttgcttctatgttgccattttggaaccagaagtctcctccaaagattgtttttttcatcaaaattagctcatatgatggttctgctgtgtcttaacctgtgatccctaaaaaaagatcctgagacaaagtcttaggtggagcactctatttgggaagtgattatcctagagagcaggaatgaaagaaagtagaacaaggtacgagaaaaattcaatatgagaatgatttttcaaattggtgattggtttttgatctcctggaatctttgaaggactcttatggaatatatgtcaaaactatctgcctggggaaagagagaagaagccatttatcaattggtttttatccttcacagggcattatctcctccagtgctcagattgcacactcatgagaggtgagcaagcttccaagaacatccaatgccgatgctccagaaaagcctttaacaaaagtcagaggtccatggtaaggtaccaggtgaaaactccatcagatgatatctgtacagagctagtcaaatcctgcatagacctggttgtcacagaagtatatggaataaaaggtggtactgtgtccaatacagtcctcctctagtattacacagtctgtggcatgccttctctcttgctctttttttaatatcttagcatttaatatctgcaaaaaaagtgaattatttgataaacaccctaaaacatgttaatcatatttagatttaaaaatgtggcatcagtgtgaaatagtgcattcagccctctgtatgaggagacaaacagtgatgcctgcccaagaatgcagagagcagagacacagctgcactgtctcagcacgctccgcaaccttcaggaagaaagattccaatcacagcatattatttaaaagtattctaacataatatttagacatatcacatgcaagctttttccccctttaaactattctctaaatttggccaaacaaagtatttgacacaaaaatcctggcaaagtgcaggggtccctgcaggactgtgtggcaaaccctctgacattcttttgccttggcagataagtcaaaacaaggacaatctaaaaagaggccattccctcccccaattagcaattcaagggttagaactgaaatagtgcaaaggaaacagacacgtacatactcaaacacgccctaccccggcaactctcatagctgacaatggctggatttcataacaagcaatgatttaatgataactttgctattttttaaaaaatcaagtagaatactcaagcacggatatttcccttcaatataagacaaaaagcagcagtctggcatggcttctcttaagtcccaagtgttacagaggcctcttcaatctccaaccaaccccggtgtctacaggggcatagtataaaggattgatgggccagtccctgatgctgtcatcaacctgaggccataactaatatccaccatcaatcttcttcatcatctattttcagtttgccttgaccagtattttggcagctcgaggcttttctggttggataacccagaccttcatccttgagaaaccttagtttttatttgtctcatcttggttgggccaaggttgctcaatttctcatttatagttgtcaatgaacatggaggcatccaaagataacccagtgaatttccaaattccagagctactcctaccagataccatgatgcaacatcagtcctcatgcaataatcagactcaattatcctaccaatatagaacaccccctttttgcctactgatcctctgatttggggattcaagagtgaccaggggtagagtagcttcattcactggaactcttactgtgtcctcccataggtgtgttatacccatgagaaaccagacattttattctggaagatcctaaggctgtgaagatgaatattctcccaaagtgtatcactggaagtgatagtgaaaaaggccaatcccacttccatcccttggttcccagaccccagttttctagccatgagcaaaacaaaagcagcatatattggccatttttctctgaaatcagaacctaagacaaaagctcatattccatgcccaaaatgttttcatcaacacaaactgaaactgtacccgttaaaccataactctcattacccctctccgaagcccttcgtagactattctacttcctagctctgtgaatttgacttctaggtgcttcatagaagtataatcacacatttttttctgacttctattcaacataatattagaagttctaaaaaaggaaataaaattggaaatgaagaattaaatttatctctgttcacagatgataggattatatatttagaaaaccctgaaaaatccacacaaaaaactgttgagtagtgataattacataataatgtgagtgtacttaatgccactgaattgtacacttaaaaatggttagaatagtagattttacatgatgtctattttaccactacttaaaaagaaaaccaaactggttttggtttttcttaagaattgagaaaaatgccagcccagtagtcattagccagcgtcagaggttgtatgtaaagagcacacgtggcctagcagctctgtttgaggatgtaacacctgataaactaatggctacgtgagtgcaggcaagggacggaacgttttaactccaagagtcaggaaatccatcatgaaggtatcatatgcttgagaccttgaggacagaagggatttccacagtggaaggagattactccaggctttccaactgcagatgcaaagacattgtctcttccaccttgagaatactgaaatcttctttatttgattatcttttggacctactctgaatagctgctaaggtaattttcattcttttttttttttttttttttttttgagacagagtctcgctctgtcgcccaggctggagtgcagtcactgcaacataagcctcccggattcacaccattctcctgcctcagtctcctgagtagctgggactacaggcacccgccaccatgcccggctgattctttgtattttttagtagagacggggtttcaccgtgttagccaggatggtctcgatcttctgacctcgtgatccccccgccttggcctcccaaagggctgggattacaggcgtgagccatcgcgcccggctggtaattttcattcttataattgctgactagttgagaagaagaggtcccaaactacagagaagaaaggaagaaagatgtgtccagtgaaatccagggtccccccgctcccattcaaggccatctgaaagtatctccccctgcttttcaagttcatcgaatatgtttaagaaacctggaatttccaagtccatcagcctattgaaacaaaacagctataactataaaatttagatccttttaagattttcaatccttagaattaaagatatttattacaaaatatagttgtattaaatcatatatgtcaaaatattacaaacgtgtatttcatattagataactatcaacaacacaaaatttcctatcatttttcctagtgctccattttttcagaccttttcttaatctattttcttgtctgagaccaaatacaaatgaatcaaaagccatttcagtgttacatattgggtttccacgcatccctgtagcatctttatcagtagccttgcgcagagtacacacttttgtacctccttcttattagcaacttcattttttcatagtacagaaaagaattcatataaccccatcaggttccttacatggacccaagttaaaacgcatcatctcaatgtcagtctcttggctgtctgcagggtaatatggtgaattgctgcctgtgctgtaattttgtcagctctttagtaaattacagtcaaggataaagaggacagagctgcctactgacaaacaacattctttattctcctttttctacaatgtactgaataataccttagagcgtaagtcatcatataccctatataacaaatgtataattacaacacatgaagcccaaaaaatgagcttcaaagaatatcacgtttttttttaaacaggaagtggaaagatgtttcagaagagtgagcacaggttttagactctgaaatcttttagcagcatgatgcttttgaacatctgatctaggttttgattctgctagctacatgtatattttagcctttggtcttgcattaaaacaccagttgcaaataatgttagaaaaatggggaatagaggaaggaatatttttatttactttatttttaaaattctgcatatataaagaacgttgcttgtggcatccctgactctttgcaacaaccttataaagtcgtcattattagcctcatgttacagcagaagctgtgagttgctgccaaagttgcttactatcaacctctgaagagatgaaacagagagtcatacaagatctgtttaaatccaacagcctttgacactttaaacttcagaacacattggatttacacgtgtaaaattgccttagagtttgtaatttcatgaaagcaaaaattcaacttttccttaagaacaaatttagcatgtatgccttgaaactggcttattaaataatatgaaaatgttcattgtggctatttggcctcctaatgcttagttttatttagcaaacatcaaaacaaaatatgtattaatccaaagcaaatatattttatttaattggattattaatagttcactaacatcatactgtaggtatttttcttttctataaatgttttatattccagtctattcaaaaccttacgaaccaaatcctttaaaggacgtaagtcacacatattttcaaaccaacaaaatagtaaaattcagggaacattagatggaatagggaagatgaaataaagaagcaactaagagatttacaagaatggagttcttctgccaccttgtggttgttctgtgttataacctagagctacattaaaatattcagggaattcttcagccagagtctctttagccaggtgtggcgcgtggctgagctctggtcaatggaatgtggccttggtctttattgactgtggttatcgtgtttccatttttttcttcctgaatatcatagctaattttggtattggcgacgaccgctttcttaaactttctcttctgctgggtttagatttttctctccttgtttttctcctatgaaacaaataagcattactagatttcatcaaagatcatcacttcatcacatcaaagatttcacttcactctagccaaactggcctccctgattctcctgcaacacctcacacatggtccccttagggtcttctacaacttaacatccctggctgcaacactttcctctgataccatatgggacctactccacctctttcaagtctttgttcaaatgtttgtttttcaatgaccaccatatttagaaatgcaacttctgctaacaaactccttattatttttatcttactttattttttactgcagttattctaacatactacataattttaatacttattgtgtttattgtcttttttaccatagaatataaaatccatgagggcaagggagtttgtttacttcactgctgtgtgctctgaaacaaacaaacaaaaaaaactgcctggcacattgtaggcgctcaaaaaatatttgtccaattaccgaatgaaagaattataactccttctgttggctaaagcaacctacgggacagtgtttagcctcacaagtattcagacacacaaattaacacaaagtatcatttttttctacaatattaattagtcaatttatgtgacctttaaatataatttctaaagcaagcgagaattcagtggattacatacccacatgtttttgttaaattatttgtagttatttttaagtcagtttgcatagtcattaaaattttataacctttgacccagtaatcccaatttaggacatgtattgcaatgaaaaaaatccaaaacaaagaaacatgtaggttccatgtggccatttactgcagtattgttaataatgataataagctgaaagaaactacatgtttaataataaaaataataaattaaattaggttaactctatgcagtgaactattttgcaaccattataatcataaggactgtcctagaacctgaaaaatcatttatggaacatgctatattacagtgaaattttaaactatgtaattacacagtttttacatgtatataggaaaagattacaaggaatgtgcaaaacttagaattcttacacatgggcaataaattaaatcttactgttgccttcatttcccaaatgttccaatttatcaccagagtttttgcaactctttagtatttgaaaggaaaaataattgtcttattctcaagtgcttaaccttcacctgaagtgaatttgttctaagttccaaaaagcgattattacttgctttcattgtattcatcaagaacaatttacatctctgtggaaatagctttagttagagtcattagttagatttagttaaagtctttagttagatttacttacatgaaatgagacatttatccaataaattcaggctgaatttaacattaattcaagaattaaagtgctcttcgtttttaaatgtgtctgttccacctaactacctgcatgggtttagcttataattggttctatggatatgactaggtccatcatcctgtcacatttgaataaataggactgtctataaccgtctctgttttacacacatctgtgcccatcagttcatagcacattccccaaaaattaatgggaaacagccaggagaacagggggttagacaaaggaactcaaggcttgaagtgacctcctcaaaaactggcttcccccgcccttgatagctgaactgaccttcagccctaaccagatcttgtttcctatcatcttgcttcatctctccttccctaccagctctcactcaggccagcctttagcttatgtctgatgtggcctgacttactgttgagacaggtttttttcccaggtgccttgcttagcaaagattttggttgtgtggattttgctgtgtttggattttggctatgccctagtcctactgttgtaggattttctccttagttcacctaaaagccaggtccttgtcacacagccatgaaatattaggctcacagacactttaaagggtgagaaaaatggaatttatggggcaaaaaggaaaaaatgggaaacggactcagcagagagagagtcctgctatacatgcttccctcctcacagattgaatcccggtttccacccgggaagaggaggggtcagcctcctccccactgcaaacggtgcaaacttctgtggctccaccccagtgctcactcttcccagtgtgcaggctgcctgaagcttctctgtggacccctttccacttggctgtctcactacccttactgatcactatgagaggtagcgccctcccttgcattgtctcccgtgtgcgtaactctctgccacctgccactcccaaactgacagtgtagggattaactttttgggtcatactattaactcctcagtgtgaaatgaagtcagaccaaccattcattgattctcttccttgtaaagctaaagattcacacgataaaaacaaacaaaaacaaaagacaaagaacctaaactctctgtatgggccctctaaagaccctccctagtgggaacatttcactcctcaccccactgtcaggtttgccgcatggcttactttggattaaaaaaggtgagcaaactttatattctacatccaacagaagctttcggagccatcacatcacccttccattgctttgtattccctctgccaaagactaacaatatcctaaataagggctgcttcttccactgaagtccagaaatgaatcagagcaactgtcctgcaatgaaatttaaaaagaaaacaaaaaacaaaaaaaaacagaaaaccaaaaccaaaaccaaaccaaacaaacaaaaaaactgtgttattatagattactaaaatttttggagtcatatgttaccacacataactcagccaacactgcctaataaatcatatttctccctaacaacacttaaggagacagcatgttatagtgggctcactggctacctgtgtaaccttggacaagttacctaatctcactgcaccatctgtagcattgagataatacctacttcgtcaggctgttgtaatacataaatgagtatataataaatgcttaataaatgttagctgctgcatattacagttattcttcaacagcattgattttatcctaatcctgtgtattcagtatccagcagagtgtccaaatcctatagtactccatctaggtaaattttccaaatgtctttaattgactatttccttttggttagtctcctcatatggcccctttcatcggcttccttttgccatcagttttttctcttttccctttaaactagcaaagactttataacatatatttaaacaggatccaaatacctttgatatggtttggctgtgtccccatccaaatcttatcttgaattgtaacttccataatccccacatgccaagggagggacccagtgggaggtaatttaatcatggtcgtggatttttcccgtgctgttctcctgatagtgaatacatctcacgagatccgatggttttataaaaggcagttcccctgcacacgctctgttgcctgccaccatgtaagatgtgcctttgctcctccttcgctttccgccatgatcgtgaggcattacagttccacagccatgtggaattgtgagtccattaaacctctttttttaagaaaattacccagtctcaggtatttcttcatagcagtatgaaaatggactaacacaaccttcagaatattcagctcatcttcacttaattctctgaattttgtactttcatatatttcaacctgttctttgccttaaaccaaactccaaataaataattttatgtaccaaaatttctgctcaaagaacattctaggacatagtatgctcaatttgtaaatacttagaaataccttaaaaggtcacaagttatggtggcagagtctcaaggaaaaccctttttagaaaccattcttttctactttcatgttcttaagggtggggaataatcttcttttctgttttctctacatgagacaattatacaaaaagacaacctttgtttcttagaaatcctataacttttgtgtctttagtttctttatagccttctatttttcccacacaaaacaactttaatcatctgtgacactgatttttatggcaacccattttcctggattctataaacagagacacaggctttaaattaccaaaatcacactgttcaaaaacacctcatttttcaaggcaagaaaataaaataaaaagttctttctcaaagtcaaaacaattcttttctgctcagctttctagatgcctaagggctttttggttgttattattccctgactttctagctatccacctgaccttcagcttctctgtcaatccaattggttcattatttccttgccaaaatcatcttcttaaaatttaaatttgatcattttactttctgggaaaaaaacctccatatgctctccaatagcaatagaacaaaggccaaattactttgcataatcctaatcactatccatttctttcctaatgccccttcttcaccacattcctgtgatgtcatctacttccccttctctggccttatcccacagctcctttccagtctcctcctcttcattctagacctatgaatgtagacatgctccacaagtacattttcaaccttctgcttttctctctggatatcctcttcccagagagctcaaatgttcccaagttgtccctgataatacctccaaacaccaccttgagcagtgctacccaacagaaatacgtcagctgcaaacaaaaactacacatttttaaattttccagtagccacatttaaaaagtaaggagaagctgatgaacttattttaatcatatattttatttaactgaatatattcaaaatattatgatttcaacatgtagctaatattcttaaattgacatattttacattttttaactgtcttggaaatggatgtacattacacttacagtatatcccagttaggattagccacattttgttagccacagtcttcaatggccacatgtgcccaatggctaccatattcaacagtgcagatctaatgctctaaacactttctcaaagtatgcctttggtaacccactcaacatctacccaagaatgccctcccagcacttcaacctccaggtctaaaacaaaatacatttccctcctacatttcctagtgcctcacaaaagcaccagctccccttcctgacttccttgtagctaccagtaggcccaaaaatataccgatatttgggttctataactattgaaatattgaggaagcagaaggaatctttcaggtcatcctatccaacctctaggattttcctctacagagtggtttctaacatatggctaaagcttctgtgagcctcctgatattgtaggcaaaatgtccatacctggatttttctggcaaaaatgtatctttagctttaaacaagagtttaaacaccatgacccaggctcagctctgcctcttctctcttctgtaacggccacacccaatttattaccaaatcctgatcactcaactttcctgatctctctaatgcaaacctacttctcccttcccactgccactgacttagaattatgtgcatatttcttggagtgctttagctacgagagcaagagactctgccagggatcaacagggccagtctgctattagcaaaagagcagctatagcataatcacacatgaatacccataatagattcagctaggccgaaaagattagaaaacagaatcaaaaccagggcagcaggaagatgaactctgactagtgctgcaagccagactgtaccaagggatgtctcagccattgaagaggtcatgtctgacacaccactggggtccttggtttgtagatctcagtgctctgaggagaggatggctgagttgttttgttttgttgttttcaggaaccctcagtatttccctgttcaggtacctggggcaaacttggccttcctctcctgtgcttgcacccatgccaaacagattggttctcatttgcacaagatattttctggtatcctcaggttaccagaattggggaggcattttaggggaacattctctgtgtctgagtagagattgcttccctccagagtctggtgattcctccaagtctctaccttttccagatttgataacagatttctggaagttggactttggactacagcctcaacaaatgatattatctcatttatttatttatttatttatttatttattttttgagacggagttttggtctgtcacccaggctggagtgcaacggcgtgatctcggctcactgcagcctccaccttccaagttcaagctattctgcttcagcctcccaagtagctgggactacaggtgcatgccaccactcccggctagtttttgtatttttagtagagacggggtttcaccatgttggccaggctagtctagaactcctgacctcaaatgatccacccaccttggcctcccaaagggctgggattacaggtgtgagccactgtgcacagcctggaatgcacttattttaaaacaaatttattcaaaagaaatacacttatttgaatctgggctaaatatgatagatgaaatggtaatttagaatgtccaagctcttctcaataatgtaagaaatctctcttatagcacacattaatattatgacttaaaggtccttttcaaaaaactaaacaacaaaataaaaaaggaagaaattgaggggaaaaggaagggaaggagaggaaaaaggcagaagagaagatgggagggagagaaggtaggaggacagaagggaaataagaagcaagaagagaaaggaaggagagagggataaaatgaggttaaaaaaaggagagaagaaaagtaagaaagaagaaagggaggaaggagagaaggaaggaaagaaagaggtagagagaaaaaggagggaaaaacacatctcaaatcacgttaatatagtagatgcaatgctttattaatcgtgtagaaaattagatcaattaatcattacttttccaagtgtaattaaaatattaaattattttgcttgcattaatcatggttagtgaaaagctactaacaccactttttctgtaaatttttgttaataaatctagggaaaatgcagttatttggaaaaattaaacaaaagcttttaagctgaaggattataatttgaaattctttgcacctgtgattcttccaaaacagctggaagatgggatctttgttgccctcatcttattctgtgtgtgctgtatgatgcaatgatgaggttctctagattctgaagtcaaatctggactccagaggggaatctggaattttcaacgtttgctaatagataacataaatacaactcactcattcagtcttattgcttagcaacagcagaaaatgcatctggtatgtgccttgcccttagtagttcaatactcatatgtgaaaaattattattttttgtgttttggaatattgctaatgaactacagataaggcagagagtgtaatgaaaacaaaaataaaatggaaatatataaataaaaaaacacaaattaccatttctttctgtaaatctttgtacatttgggggaaatctatatttgcaggaatttggaggaaaaatcaacatgaaacaaaggtttttcaggtgttcattagagtgtgacaggtagggctctctggaagaaacagggaggtggggtttgaggtcacagcctatgaagggaagggaggggaagcaggattatgcagaagccactctgggatgcaggttcctccaagatgatccatgtgctttgtttcctcagaaaataatacactggaaacactttggggccttttgtttttttttttgagaccgagtcttgctctgttacccaggctagagtgcaatggcgcaatcttggctcactgcaacctccacctcctgggttcaagcagttctcctgcctcagcctcccaagtagcagtgattacagctcacgccaccatgcctggctaattttttttttattattatttgttggctaggctggtctcgaactcctgatctcaggtgatccacctgcctcggcctcccaaagtaggggacattgtttttaaaaagttaaaggatacaaaattaaaaagctagataggaggaataggttctagtgctctacactactgtaggatgattatattgaataataattaacagtagagtttcaaataactaaaagaaggatattgaatgttcccaatatgaagcaatgataaatgcttgatgacagatatgctaattaccctgatctaagcaccatatattatatgtatcaaaatatcaatatgtaccccacaaacatgtacagttattgtgtgtcgatgttaaaaagaaaaaagaaaaatagtttggatggatcctcaaaatgttctatctcattcagcttccataagtgacatttattaaaagtttttgattaaaaaggaaactttttatgaattatgattgtgacaaagattctgtgcttgaccaaactttggtccagcttgtgaatgttctccgaggcctatctgtgcactttcttataaaacacggttttagaagaaccctgctaactttagcaagaaccctccatccttgatatctgatcaggttcctaaccctccaccatcccccagatgatatctgatcatcctggtctatcctcagcaagaatctaattagttcagtttggccagaatcctgcttactcctggtgttatttcttagcaatttttcatgcatgactcccgccttgcaccttggctataaattccctcttgccaatactgtatttggaattaagcccaatctttctccccacggaaaaatcccgctgcaatggtccccatattataatggtcctggataaactgcctgtttatttgaagtatggtagtactttaaagtgtcattgagttttttttctttaaccattattagggaaatacaccaaaatgttaacattggttgtattttttctgcttctatgtacttgtcttcatttacctgttatcaagagtaagcatgtataactcttaaggaagttataattatacaataaaaacccaacaccaaaaggggtgagacaagtgtttatggggcaaagagtgtgaaatgagaaagtttggatctaaaaaattaaaaattaacaatggtttattttgattgactggaattataaataattttatttccaaatttctttctttcttttttttttaatggagtcttactctgtctcccaggctggagtgcagtggtgcaattttggctcactgcagcctccacctcccggattcaagcgattctcctgcctcagtctccagagtagctgggattacaggcaactgccaccacgcccagctaatttttgtatttttagtagagacagagtttcaccatgttggccaggctggtctcaaactcctcacctcaagtgaaccgccctcctcagcctcccaaagtgctggggttacaggcataagccaccgcgcccagcctacttttccaaatttcttatagagaggagttattacctttatcatggggaaaaaagcaagtccttcaaacacttttgatcttaaaatatatttaaaatataaaataatgaacctggtggagacgttaaccttgggtagctgacacaggtacttctccaaggagagaaataaacagttgacatagctttaagtcttcctaaactcaggttgcaataggagcagtacagtttgctgagagggacagtgaacagcagtattcggaatagaggagcggcctccagtacaatgactagttagaggttctttcggggattctcagggtttctgaaagtggaaatgcctcttcatctggagcacttttgaaagggacctcgatctatctttcctccatgcagggggctttccaaacacatcatatgaaaattacagcaagtggcatctgtcctgttaacatccctctccccatgagtcattcaggtgttcatcacacccacagaccctccactcacaccaccatctcccaccatcaaaattattcgtaccagtgtgactagaggcctgctggattctcccctcatccactcagaggatgtctcttagaaaccatgccaagcagggtgcgaaccatccaactccaagcaaagcctgtgctgccgcaactctgcctcacggactcaaagactgtcactggtggtcacagaattagtcaacaggaacttgactgtactgggggaagttttccaggcctcatctcatctctcagttccaaagagctaatctgagaaataaattaaaccttttacagtattgctgctgtaaaatcaaaaggaaaatcataaatgttgtagaaattgcaatcttgatgccatttaaaatgccatatcttttcagtcaacgcaatgcctaggttatatttttctcctttaaatcaagtaggccacttaaagagataatctgaatatgaatacattctacattataacacagaagagatagagattaaatggatttttaaaattttagaaacttggaatgaattgattccataatatatatatatctccttcagagaattattttactttaaaatctccagtgaaagatatttgaaagccatctttgtttttatgtatatttgaaatttctgattgattttgcaatgtaatcttttaatagtcttagaatatattccattttttaaaaatcatttcttttgtttctgaatttaagatgtataatcatcttataattgtataaaatattctaaaaagcattgcaatctaatatctgattttacggaattaattttttattctatacaaacagagtcttaactaatttcagggagaatgatctgtttgtaatttaaccttcaaattaaaatccaactagctataagcttttagatgcctgcctcatagggaatgagatatttatgagggaagtctaatggttaagtcctaaagtcttcccttggaagaaggataaaaggtttctaatcattgaatttttaaaaaatcattaatgaaggtattaactggactaaggcataaggggtaaagagtggcctttaatgagatttgaagacttgttctagaatatatgttttgccagaataaaacatgtatcttctgatgggatttggaaaggtagctaccaaaccagggaaaagagtccattggagaggggagaatggaaacacttctacctggcgcatgtagggtacaggtgggtatggaaggcgcgatatgcgaatatagggtttatccccaggcgtcaaggtacatgagaggtgggaaacagtgctcagcacaagtgagtgccatatactgtttattcttaacaggtcaaaagacaacaagaatgtattaggcagcaaaggggtattacatcactctgagtaacaccatgtgtgttagagctgactattctaggtatatttgtagccacccttggtgtaaaagattttttttaatttatttatttaggtatggttcattgcccatttaaacttaaagcaaatgtaatttttggcaatctatttccctagtttaaatttgtcgctgttgatttggtgagagccactcacaacatagatgaaaaggcatatggccaggcacagaaagacagacactgcatgatctcactgaaatgtagaactaaaaaagtcgaacttatggaagcagagattagaatgatggttacccagggttgagggcagaggggagaatcgggcaaaggatacaatatttcagttacatagagggaatacgttcaagagatctactgtacagcatgatgactagttaaaaacaatgtactgaatacttgaaaatagcaaagagagtggattttaaattttcttaccacaaaaaaagtttactatcagtatgctaattagcttgatttagccattctacaatgcatacatatttcaaaacatcatattttataccataaatacatacaaatttattttcaactaaaaaaactaaaatagcatatgggttaacacaaattatcatttaaggcgctatttaattgaagcagttatttcatctaggcttgaggcatcactgtattctaaaaatgaatggtttcaagttctagatccacacactgctggcttaaataaaagtctacatggggaccttgagtgtaacagaagagcagcagacacagagggcctgagggtaagatacagatagtgggagagaataagcaggctgggccaaggattagcttttatccgtgacctccaattacaactgattatctgcgttgtgaccacagaagaatgaaaattatttgcagttagaatcaggatccatgaagttacactttatgttcatatttctgagtataacattaaatatatttattgctcttttctcctacaaaaggggaagtgaccccctttttaaggacctgcttaaaaacatacaaaaatcctgggcaactttcttggtgtaggaattgctttatagtagtcgaacagaagtgattattccattggtaattctgcacccagacaagcttgatatatctattgaggacatatgtaaagtaaaaaaaaaaaaaaagttctcatatagtcctcaaaaatgctaattgaaataaatttgtactttccttgggctggatttatattagaacatttaatttcaattaaacagacaacctttaagtcatgagatagctgaatagaaccctccagcaattattcccaaacaggagcaccaaattgaaaaactactcaagcaaaaaagcaccttcataaaagccaaaatcaggtgaacgatcacagtacctgattctgacatcatatcaaggaaagaggcaccgatggggttaggaaaggcaggcctgccctgtatacagcacttctcccttaccctccagcagcagcaagtggagggagaatctgtgtgcctgggggagggagaacagagtgactgtggaactttgcattggaactcagggctgccttgtcacaacggaacacaacacaagccagtgctcacttagctgaattctgaaggaaacaccaaccccagccagagaggaacgctgtgtcccagtggtaggagtttgagacccagctagctctgctaccagctgactacaggggcctggggcccaggataaatttaaaaggcaatcagggccgggcgcagcggctcacgcctgtaatcccagcactttgggaggccgaggcgggcggatcacgaggtcaggagatcaagaccatcctggctaacacggtgaaaccccgtctctactaaaaatacaaaaaattagccgggcttggtggcgggcgcctgtagtcccagctactcaggaggctgaggcaggagaatggtgtgaacccgggaggcggagctggcagtgagctgagatcgcgcccctgcactcaggcctgggcaacagagagaggctccatctcaaaaaaaaaaaaaaaaaaaaggcaatcaggccacaagggtttcacaaggacattcctggtgctgtgctgagcttgaagccactaggcttgatttacctacaacccagtgaaacaccagctgtggtggctaagggattgtttgtgtcaacctctcccccaactccaggcagcgcagctttcagctccaggaaaaactttttccacttgcagaaaggagagggaggaatacagaggactttgtcttgcaacttgggtgccagctcagtcacagtaaaataaaccacaaagcagattcttaaagcctctgattctagggcccggctcctggacagcatttctaaacctgcttgggccagaagggaacctgctactctcaaggtaaggacccggtactggcagcattccccacttgctgatcaatcgtcccttaagccttaaatcagcatccgctgtagctcggcagtagttgccacaagctttgggtgagacccagtgctgtgctggcctcaggtgtgacccagcatagtccccgctatgatgtccaagggactgctcacatcacctctcccccagctccagtcagcccagcacagagggagagactctttctgtttggggaaagtgaggaaagataatgacagactttgcctggtaatccagataatttttctagatcttattcaagcccaccaaggcagcacctctaggagtctgtaagaattactaaggtactgggcttggagcaacccctagtgtggatacggatgtagtgaccaaagacttagatcacaacactcaattctctttgaatacatgaaaagccttctcaacaaggacaagtccaaacaagcccagaatgtgatgattagaataaatcttcagttcccaaatatcaatgaacatgcacaagtatttccataaaacacatggaaattaaataatatggtcctgaatgaccagtgagttaatgaaaaaattaacaagataattcttaaaaatctcttaaaacaaatgaaagtatcacatacacctatggaatacagcaaaagcagtcctaagaagaaagtttatagcaagaagcacctacatcaagaaagcagaaaaacttaatgtgcacctaatgatgaatcttaaagaactggaaaaacgagcaaactgaactcaatattagtagaagaaaagaaataagaaagatcagggcaaatacaactgagattgaaatttttaaaaacacaagagattaataaaacaaaaaattggttttttgaaaagataaacaaaatcaacaaaccttgtgatgtttaatactgaatgtcaacttgattggattgaaggatgcaaagtattgatcctgggtgtgtctgtgagggtgtttctaaaggagattaacatttgagtcagtggactgggtaaggcagacccccccccttaatctgggtgggcactatctaatcagctaccagcatggccagaaaaaaaagcaggcagaagaacatgaaaacactaaactggcttagcctcccagcctacatctttctcctgtgctggatgcttcttaccctcaaacatcagactccaagttcttcagatttgggactcagactggcttccttgctcctcagcttgcagatggtccattgtgggaccttgtgattgtgtgagtttcttaataaactccatagatatatatatatcctgttagttctgttcctctagagaaccctgactaatacagatattggtaccagtagagtggggcactgctgaaaagatacccaaaattgtggcagtaagtttggggttgggaaataggcaagggttggaacagtttggaggactcagaagaagacaggaaaatgtgggaatgtttggaactttctagagacttgctgaatgtctttgcccaaaatgctgatagcgatatggatggtagggtctgggttgaggtggtctcagatggagatgagaaacttttggggaacttgagcaaaggtaactcttgttatgttttagcaaagagactaacagcatttcgccactgccctagagatttgtggaactttgaacttgagagaaatgagttagggtatctggcagaagaaattcctaagtagcaaagcattcaaaaggtgacttgggtgctgttaaaggtattcagttttataagggaagcagagcatagaagctgagaaaatttgcagcttgacaatgcaatagaaaagaaaataccattttctgaggagaaatacaagccacctgcagaaatttgcataagtaacaagaagctgaatgttagtccccaagataatgtggaaaatgtctccagggcatgtcagaggtcttcacagcagcccctcccatcacagaccggaggcctaggaagaaaaagtggttatgtggaccgagcccagggtccccctgctgtgtgtagcctagggacttgctgccctggttcccagctgctccacctgtggcttaacggggacaatgtagagctcaggctgtggcttcagagggtgcaagctgcaagacttggcagcttccacatggtgtcgagcctgccagtgcacagaagtcaagaattggggtttgggaacctctgcccagatttcagacaatatatggaaatgcctggatgtcaggcagaagttttctgaagaagcaggactctcatgaagaacctctgctaaggcagtgcagaaggaaaatgtggggttggagttcccacacagtatccctactggggcactgcctagcagagttgtgagacgagttgtcctccagaccccagaatgggagatccattgatagtttgcactgtttgcctggaaaagccacagacactcaacaccagcccatgaaagcagccaggagcgagactgtacccacaaagccacaggagcagagctgcccaagaccacagtaacccacctcttgcatcagcgtgatgcagatgtgagacatggagttaaaggagatcattttgcagtttttagatttgactgtcctgctagatttcagacttgcatgaggcctgtagcccctttgtttggccaacttcccccaatttgggacaggtatatttacccattgcctgtaccccattgtacctaggaagtaactaacttatttttacaggctcataggcagaagggacttgccttgtctcagatgagactttggactgtggacttttgagttaatgatgaaatgagtcaagactttgggggactgttgggaaggcatgattgattttgaaatgtgaggacatgagatttggcagggggcaagggtggaatgttatggtttgtctttgtttccccacccaaatctcatcttacattgtattcccataattcccacatgttgtgagagggtcctggtgggagataattgaatcatggagccggtttcccccatactgttctcatgatagtgaataagtctcacaagatctgacagttttataaggagtttccacttttgcttcattctcattctctctttgccttgctgccatccatgcaagacttgacttgctcctccttgccttctgccatgattgtgaggcctccccagtcatgtgggactgtgagtccattagacctctttttcttcccagtctcacatatgtctttatcagcagtgtgaaaatggactaatacaaacctttagccagactatggggaaaaaagggagaaaagtcaaataaataaaattgagatgaaaaagaagacattacactaaaaccacagaaattcaaagaatcattagagactactatgagaaaatgtatgccaaaaaatttgaaaacctagaaaaaaatggatatattcctagatacatacaacctgcaaagattgaaccatgaaaaaatccaaaatctgaatagacaaataacaagtaatgagatcaaagctgtaataaagtctccgatcaaagaaaagcccaatacctgatggattcactgctgaattctaccaaatatttgaaaaactaataccagtcttactcaatctattccaaaaaattcaaggaggagggaatacttccaaactccttctataaggccagtattatcctgataccaaaaccagagaaaggcacatcaaaaaaagaaaactgcaagccaatatctctgatgaatattgttgcaaaaattctcaacaaaatactagcaaacattttcaacaatacatttaaaagatcattcatcacgaccaggtgaaatttatcccagggattcaaggatggttcaacagatacaaatcaactgatatgattcatcatatcagcagaacaaaggacaaaaagtatatgatcatttaaatcgatgctgaaaaaccatttgataaaatttgacatcccttcattcatgataaaaaaaaaaaacttggtatagaaggaacatatctcaacataataaaagttatataagacagacccacagctagtaccatactgaatggggaaaaactgaacacctttcctgtaaggtctggaagacaacaaggatggccactttcaccgctgttattcaacatagtactggaagtcctagctagagcaatcagacaagagaaaaaaataaaggccatcaaaattggaaagaaataagtcaaattatccatgtttgcagattatatgatcttatatagagaaaaaccaaaaaccctaaagaccacaagaaaactgttagaactgataaacaagttcagtaatgtttcaagatacaaagttcaacatacaaaaatcagtagcatttctttttttatattttttttaagacagagtctcactcttgttgtccaggctggagtacaatggtgcaatctcggctcactgaaacctctgcctcccaagtcgctgggattacaagcatgtgccaccacacctggctaattttgtatttttagtagagacacagtttcaccatgttggtcaggctggtctcaaactcctgatctcaggtgatcaccccgctggcctcccaaagtgctgggattacaggtgtgagccactgcaccgggccaaaaatcagtagcatttctatatatcaacaatgagcaatctgaataagagataaagaaaatatctcatttataatagctacaaataaaataaaatacctaggaatttaccaaagaagtaagagatctccacaatgaaaactataaaatattgattgaagaagttgtctatagttcttcatgacttttaaaaataataataaatgtagaaattgaagaggacgcacaaaaaatggaaagatgctcatgctcatggattggaaaatttgatattgttaaaatgcacatactacccaaagctatctacagtttaaatgcagtcactaccaaaacaccaattctattcttcacaaggaaaaaataattctaaaatttatatggagccataatagagcctgaacaggcgctatcctgagcaaaaagaacaaaactagagaaatcatattacctaacttcaaattatactggagagctatggtaaccaaaagagcattgtactgccataaaaacagatccataggtcaaggcaacagaataaggaccctaaaaataaatctatccattaacagtaaactcatttttgacgaaagttccaagaacatgcattgggaaagcatagtctctttagtctctttaataaatggtgctgagcaaactggacagccacatgcagaagcatgaagctagacctctatttctcaccatatataaaaatcaaatcaaaatggattaaagacttaaatccaagacctgaaactttgaatctactagaaaacttcacgaaaatctccaactcattggtctgagcaaagatttcttgagtaaggcctcaaaagcacagacaaccaaagcaaaaataaataaataataaatgataataggtaaaacaagttaaaaagcttctgcatagcaaaggaaacaccaacaaaatgaagagacaacctgcagaatggaaggaaatatttgcaaactacccacccgacaagcaattaataactagaatatataaggagcttaaacaacttgatagaaaaaaatcaaataatcttatttaaaaatgggtgaagaatctaaatggacatttctcaaaagaagacatacaaatgatcaacaggtattgaaaaaaaggccaaatatcactaatcatcagacaaatgcaagtcaaacctgcaatgagataccaccttaccccagttaaaatggcttttatataggcaataacaaatgctggtgaggatgtggaaataggggaagcctcatacaccactggtggaagtgtaaattagtacagccacagtgaagaataatctggaggttccttccaaaactgaaaaaggaactaccatatgaggcagtaatatcagtgttattatagtctgtgtttttctgggtacttactattaccagtaagttttgtaccttaaggtgattatttattgttcattaatgtccttttgttctcattgaagtactctttttagtatttctgtaggatgagtctgatattaatgaaacccctcagcttttgtttgtctgggaaagtctttatttctctttcatgtttgaaggatatttttaccagatatactattacaggataaaagttattttccttaagcacttcaaacatgtcataacactcttcccttcagggcagcaaggttccccaggccctggatgggtcctgaagtgcagtccaagagtcaaagactagagtcaaaaaacatagaagtctacaggtagaagtctacctggtattctattgtgactgagctgacactcaaaccacaagatgcagtccttcccacttttccctcccctttccaaaggcagaggagcctcactctgtagcaaccaccaccatcactcctggccataaggagtactgccagactaccactgatgttcccttaaggcccaagggctcttaaatcagcttgcagtaaatgctgcatggcctgggactcacacttcagggcagtaggctccgctctggctcagggcaggtccagaaatgccatttaagagtcaagtcctggaatcagggaccccaagaacccacttggtgctctaccctgctgtggtagtataagtatctgaagccagcaagtctcagacattcaccaagtcccttgatttagaatatgggtatcactgcttgttattcagagcccaagggctctccagttagcaggagatacatgctgccagggcggggtccttcctttcaaggcagcagcttcccttctggcccagggtgtgtctagaaatgtcgtctgggagctagggcctgaaacaggggcctcttgattctgaccagtgccctatcctgctgtaactgacctggtatgcaagatgaaagacaaagtcctccccactcttccctctcctctcctcaagcagaaggcaggcgtgtcttttggagctgtgagttgtgccacctctgggctagaggaggaataatgccagcactcccttggctgccccagctggtgtctcagtatgtcacatgcccctcacaatccactgtctctgggcttagtttagccctaggacttgcctatgagtcgcactccttaaggcctagactccctttcaagtttacttatggactaagagcactttggcccttgatgggaggtttgcaggcactcaagtttgggatcagcactttggaatcaaattaaaatggattaaagtcttaaatctaagacctcgaactatgaaactgataaaagaaaacattgagaatctctccaggacactgggcggggcaaagatttcatgagcaataccccataacacaggcaccaaagcaaacatgaacaaatgggactgcatcaagttaaaaagcgtctgtaaagcaaaggatacaatcaacaaagtgaagagacaacccaaagaatgggagaaaatatttgcaagctattcctctgacaagggattaatcactagaatatataaggaactcaaacaactctgcagaaaaaaaaatctaataatctgatttttaaaataggcaaaatatttaaatagatggttctcaaaagaagacatacaaatggtaaacacacacatgaaaaggtgctcagcatcactgatcaccagagaaatgcaaataaaaactacaaggagagattatctcaccccaattcaaatggcttatatccaaaagacaggcaataacaaatgctggctaagatgcggagaaaagggaatcaatccttgtacactgttagtggaaatgtaaattagtacaaccactatggagaactgtttggagggttcccaaaaaactaaaaatggagctactatatactccagcaatcccactgctgggtatatacctaaaagaaagaaaatcagtataccaaagagatatctgcacttctatatttcttgcagcactgtttacaatacctaaaatttggaagcaacctgagtgtccatcaacagatgaatagataaagaaaatgtggtacatatacacaatggagtacttttcaaccataaaaaagaatgagatccagtcatttgcaacaatgtggatggaactggagatcattatgttaagtgaaataagccaggtacagaaagacaaacatcccatggtgggatctaaaaatcaaatcaattgaactcattgacatagagagttgaaggatggtttatgagagggtggaaatggtggtgaggggttgggggggcaggttggggtggttagtgggtaccaaaaatttagaaagaatgaataagacctactatttgataggacagtagggagactatagtcaatgataacttaattgtatgttttaaataaacttaaataatgtaattagattgtttgtaactcaaaggataaacgcttgaggggatggataccccaattctccatgatgtgcttatttcacattgaatgcccgaatcaaaacatctcgtgaacctcacaaatacatacgcctactatgtacccacagagggttgaggaggatgtgaaacccttatacactgttggtagtattgtaagttagcacagctattttggaaaacaataaggaggttcctcaaaaaactaaaaataaaattaccatatcatctagcaaacccaccttatatgtatatgccttttttaaaaaataaaattatgttatttgtgacaacacggatggacctaaaggacattatgttacatgaaataagccggacacggggaagcaaataccatatgatctcactcatgtggaatctcagatagttgaactcatagaagcagggagtagaatggtggttttacaggcaggggatgaagggatggtgtggatgcggagagttaataggtacaatctttcagttatataggaggaatcagttctggtgttctatggcacagtacagtaactatagtgaatattaataacttaatattaatattaaggtattttagatttcaaaaagctagaaaagaggattttcatgacaaggaaatgataaatacttgtgatcaatatgccaattatcctgatttgatcattccactatgtatgcatggaacatcacattgtatccctcccataaatatacacaattattgtcaatttaaaataatataacacttaaaaagacaaagaaatttaaaataaatacaataacatggtaagacctgtatttaaagttctggtccaaatatatggcaatgattttgatcattacagatgttactacaaacattcaaactgatacctactgagaagcactctaggctaagtggtttggaaattctgcatcccccagaatgcttcaatgcttctgatgaaagccctgatatatgggattcctgttgtgagatcctaggtgaataatcctaactgcaggactaatattggacatactcagagacagacttcataaggccaccctcacttttccacatcaggtggaaagagaaaaatgaaattattacctttcaaaatatttgtctgcttgaattatttcactcttacccttaatagtaacaccaactataatttacttgctccagagacaaaatcaggtcttcacatatccttgaggcaactctatgtgttgcatgcacacatacacacacacacatacacacacacatacattctttgctcagcctgttcattattttattatctaaccctttcattatttcattgctctccaacttggggacactttcaagactgtcaagaagttactgacttctgagtctttattatcaaagcaaatgaaataaaccatggtttcctgcccctgacacttcaccatatggtattgatgcagtgactagccacaaaatgccagatggccccaagatatcagttattcaagaataacatcatacccactcagaatacatgtataactcctcccaaagggtagtattactcttaattataaattcctttatccagtactgaagatatatgtccaaagcctaggacatacttgtctaaatatttggacatttagaaaagcaatattaaattctcatcatattgtgttgtgtcactgaaaatactggtgttagaacatatcccacaggtgtctcgggggttggtaaattatcttaaggctcatgtggagaggatatctagtagagaaactccctggagaataaaagcacttataaatagaaaatctccttccaaatggaactcatccatgttgttcatcttacatagctagatcaggaatgtatttctatgaaggcactgactgaaagtggaaatctaccaacccgttaattgatttttatattgaataaaattttttaccataactatttttattacaataattaggagcagtacagttcatgacaaaaatattacagatctcagatcgcttcacagcatgaagttattttaaatgcttatactcttataaacacttaaaagttaattttaatttaagaatggtcatttttaatgtttgatatgaccaacattcctaatttagcacaacgaaatgatggaaaacaactgggtcacactgcgtgtgtcccaccaaagaaaaaaaaaaacaaagcacaatgtacaaaatgtgcatgtttctattgacagtatatgaaaatagttaaaatacatgttacaggtaaacatgtaatattaagaaatagtactagtaaaaagttggcatgcaaaagaaaatgcaaaaaaaattcaacatggcaacacaagacagtagaatcgataacttttggataaaatatttatattgaataaaatattaacatagtatatgctacacaactttgcacaaaccttccaaaagtgattttatgtcactgagaagtgaccgagaaccttggacaagaatcaatattgattttccaggaatattccaggagaaaaaagtctgggttgaagtaatttcctttgtaagatgaacggcaagacccatacgaccatattaaaatgttgccactacaatctcagaattgtgattgccagacactaacatttctgccaaataatctaaattttggttagttaagctacaggaatttgtacagaaattttttttccaagacatgaaaatgaagaatgcaaatgaataaaaatgtactgaggtgcattgctggaggaaaatagccaaagtgaaatgaccgatatagggtctttatcaatttacaattgtatagcaagttgtaaagtaatgcaatgtattgtcattgtcaccagttgttgaattataaattatttttccctaaagttcccactttccctttcctatctattcagccaattcaggcaaatagtccattctgagttatttcctgaggatgcaggtgttacagggtagagtgcaaaaaggaaacttcctctaagtctctgatttatatgtttccaaaatcttaaagctaaaaggggtttatttttaggggcaaaaatgaatttgggaggaacctatcaagatgtgaacaggaagggatttccccagaaggctaaaagcatagggaatagcagaagaaaaacaaattaaggtggtttagagacagaacattgactccactctccaaattagaatttcagtgaaggagcaagataccaatttagtattaaagccagagaataaatttggatatttgcccctcttcttagataataaaccccgagaagtgataaagccccacattccatatgaaggcaaatagggtcatagataagtcccaggataaatcctttgccagagaatagcatggaagaaatggaatgatgccccagttttcaagcatagcatgaaagtaccagagtgatccattagacctgaagtccaaggtagacaagaatgagaattgtcttgacagtttactgcatggattggtgagcaaggaccaagtggcaccatggaatggtcagcagatatctgtgtggacagatggctcaaggacaagatgagtcatgcaatacctcacacttacataagtctcccttgaacttaaacacagcccagggaaaagagaaagagttttagtgtctgatatcctagggaaatggaggattcaaagaaaaattccattaatacatagaaaaataatgtttcttacacacctggtttagtttggactgagatttgtacctgttatgatagaaaatataattaccatttataatctgaattacaggatatgagttagcttccacatatctgatgcccagattttcctaatatgaacacagttaaactttcctacatgatatgtggacccaacatatcttccctcacatatgttctgtagcttcatatattttgttcaccgtgtgcatttcacttctcttttattcctgattctcagaacaactgttctgtgcaaagcatgacagcataaaacctctctgtccttcaaggcctgtgttctattaagtcttttatatgaactatcatttattgtacatcaaccataccaggaactttacaaggactacctcttcttcacaaacataaaaacattcaaattcagcatcataatcccctttttacaggcagaaagcatgggcttggaaaggctaagtaactcccttactttggtaaggcaggcaagcttcaaaatcttttctatttctaaacctccagcccaagttgatttttagatggtaaccttttgaatgtattgtccattctacccaaatgtctccataatacatactacttaattttctttttttacttttttaaaatcatacaactaggctcttgtcctagtcattatttgtatattaaatttaccttttaagccaaattggaaatcatcaaaattcacagatgaggcatcatttaggaaaaactttttctctatttttaactttttgcaaaatactattgctcttccagaaatatttaagcttgccatggtctcaagtggtagttgaaaaatgaaaacacatggacacagggaggggaacatcacacatgggggcctgtcagggggtgaggggctaggggagagatagcattagaagaaatacctaatgtaggtgacgggttgatgggtgctgcaaaccaccatggcacgtatatacctatgtaacaaaactgcacgttccgcacatgtaccccagaactttaagtataataataaaaaagacattttttttcctcttttcttctagatgcttacactatctctcttcttgccccgacaactaagatttttaagagtggctgcattccctgtagtctctagctcacctcctattcactccccaccccgctgcaatctggttttctctcactaagccactaagggctctttgtgatgttaccagtgagctacttgctgctaaacccaatggacactgatttgtctttatctaattgattattgtgacacaaaaatataactaaggaggaagaagagagattatctgccttgagcactttttccataagtgaaacatttaaagctttattattgaagtaatatgttcacataaccaagatagttgtcaacaccatggtgcaaggaaataaaaggaaagagtgtaaaagctaaatagcaagacccagaaagaagagagtggaggtattactcctttttgaacagcgagttccccattacctaataatggccacgcaggacctgctgcattgatagaggaacttggaatcctcttcttaaacactgtgtcccttggctctcaggcacctctcagccccacatcttccccatgtaccacttccattgcctggacctctgttatcccagaaaatttctattagaaatccttctaatttctactcatgtttcaagtcttcacttcatatctcctcatcatagagggcttccatgattctccaggattaaattccccttgctttagacaactttacaacctcttttgcaatgctcatcacagttgttaccactaatgaattattcaataatattgaatatctgtcttggctgactgtgatcttcaggaagacaaatggagatcatctttcatgttcactgatatagccctagggcctaatagagtgcctggcaaattataaatgcttgatgattgttccctgcattgttgaattgaattgtgctgaattgaaattttcttaaaccaatatttctatcacattttagaaggtgcatttgcaatatagggagtgtcttgatcagtttgggctactgtaacaaaataccatagactagtacttaaacaacaaacattcttgaggctggaagtctgagatcagggtccaatcattgtgggattctaacaaagatccccttctgggttgcagacttccaactcctcaatgtatcctcccatggtggaaagagagcaagagctctctgtcctcttcttataagggcactaatcccatttgtgagggctccatcctcatgacctaattacctcctgaagactccaccttcaaataccatctgtgttaggccattcttgctttgctataaagaaatgtctgagactggatactttataaggaacagaggcttaattggcttggagttctacacgctgtacaggaagcatggccctggcatctgctgggcttctggggaagcctcagggagcttttactcatggcaggaggcaaagcgggagcagccttctcacatggccagagcgggagcaagagtaacagtggggagtcggggaaggtgctgcacacttgtaaaccaccagatctcacgtgaactcagtgcgagggctcacttatcatgaaggggatggcccaagacattcctgagggatccacctcaatgatccaaacacctctaccaggccccacctggccccatgtaattgggaattatatttcagtatgagatttgggtggggacaaatattcaaactatatcaccatcacattgtgggttagattttgaaatacaaatgttagacacaaacattctatccataacagggaacattgaaggaaggagattattatgatggtaaatgtctacaagttctgtcaataatgaatagtctactgaagagatcttacagaagaaaaaagcatttaaagtctatcatatgtgtttattaaagggcaaaatatttctgttagataggaggaataagctttagtgatctattgcacagaatggtgattataaaaaacaattaaagagtagattttaaatgttcccaccacaaaaaaataatgagtatgtgaggggatgaatttgttaattagtttgatttaatcattccacaatgtaaacaaatatcaaaacatcacatcaagaccccataaatatataatatataccaattatttataatatttgttaattaaaaataaagttaaaaaacattttaaagactgcatagagacaattgaagaactttttctaaagcctatatattagataatggtattatatcaattttaaatgtcttgagtgtgatcactgcattgtgggtttgaggagaatcttcttgttcttctgagatactcatttaagtatgtaggagtgaagtgtcatgaataaggagtgaagtgtcatgcaaagctaaagcaactaattctcaaataattgaatttaaaacatgcgcatgtaaaatagtaaataaagcccatcgtacagaagagatactggaagagatttgctgcataagacaaaactagaacacagaggaaaagttcagctccatataaggaatgactttaacaatcagaagctaacaaaaaagtggcatccattttaataaataagagcagtccccccaccccgccccactctgctctagtggagacaagcatgatcttgagaaggtattttctcattgaacaggcagttgtagagtatgaatcctatggtctttccaccaggttagatttcctttataagtgaaggaatagtagaaactcatattcacccttctttcctttaagctatcccaagcataaaaagttgcatagagaaaagttgaacatgaactccatagaaaagaactgtgtttaacacacactgttgtcatgtttttttgttctaatagagaataaacttgtcttatgttcattgtgttttcagttaaggtttgtttggttgattgattggtttatttgttttttattatctatagatgtataatccatgcaaacaacttagcatactttgctcttccttctgaattctctaacccaaatttgtacttcaactaggaacagttgctcaacaaacatgaacatgtgcttgcttattgtttggtggataaccttattattcaaaaattcaataaatatttctatggatgtccaaagtttccagtcagttcatatccattgagacatggctggtagcaaaaactagcttgtcaaacactttagagagggaaaattaatttttaaacaaaatcatgaagccataatattagtttaactgatattaggattctggggttaaacacactttctgcattagtaatcactctatttcactttctttctgtctggcctttcttaattctcattaccaggggaaaaaacagtaattttgtgaatactgcggcatttggaattaaaaataattacacaaacagttttccaacagcacagagacagtatctgaactgagaccttttttctgcatgcattacttccaacattactttgtctttctctaccattcagcaatataacacatacacactttttttatgaagagaatcaaaacgttttcttttaagaaaagttatttttctgtttttagaaaagtttaaaaagcccacttgaagggggaaattactaaattaaatttgatatgaacaaacatgccaaataatagcataattataattattttctcccttttggtactcattctttagactacagagtatttttattcaatttttcaatgtagtacagagatagaccagacattgggaaatacatagggaaagtaagtgaaaagacacatatctaacaataaagggtagagagatggaagtatgggttgggatatggtagaaatcagggcaggagaaggcaccatcccttctacagccagagactttgtggttcatgggtagcctagatcaagtaaccagacagtgagagtctggtcagagcccagtgatcctctacagctctgaagattggttagatgagtggcacacttcaaaggctctaatcccactctatcttagagttctctaacttaaatacatcagacattctcactactggaaaaatgaagtagatgtatttttccccattcctcctgctcttctcccaactacgagttaaagaaaagaaaaaaagacactaggacattatataaaaaacagacataagaagactttgaaatgtggaaggaagaatgcaggctgcctagggacctcgggacccaaggaaagacatagtagtgagttttctaggcttctgtttctttgggttttctatgcctcatctatcccaagtcaacaatccagaaataccaatatgtatgggcaaaaaaaaaaaaaaaagcccaaagaaagcttgctcttattatccaaaaaagagcatcccggaaagatagaaaatttttagaaaataagcattctactctagccaggcactatagaaaataactgtatgctcccaaacaaaggccaagttgggcacctttgctaactctaatgaggcaccccaagcctcccaccagagtgatatcaaagaaagcccagatggaagcagaggtttttatgatgccaggcaatgagaagacctcaccttcatccctgaggtgttggcagggaggctggacttccagcctcactcctcaagtccccactagcttatcaacagaggaggtccagaggaaacttagaacaagctcagtggtaaaaaggacatccttgtctcatagtgacagtggagccactcctgcctctccatgccagggtgatgtcacagagaaccagggaaaagcctgaagtctcctgcccattcagcagtaataagaattgcctatcttcaggagtcaacagaggctgacttgggaactgggacttcaatacttgtagccccacctggaaataaggagacagtgcccctttcacccaccaaagcattaccagaagaagactgttataccagatcaataagatccagagtctgataataccctaaatgtccaggtttctatcaaaaatctcttatactaggaactgggaaaatctcaacataaatgagaaaagataatcaacaaacaccaacaccaaaatgacacaaaggccaggaatatctaacaataattttaaaacagcaattataaaaaagcttcaataaacacttatgaatgtgtttgagacaaacgaaaaacagaaagtctcagtgaagagatagaagatataaagaagacccaaatggaaattttataattgaaaaatactataccttaaaaaaattaatggatagtctcaacagcagaatggagaggaaaaaaggatcagtgaagttgtagaataggacttttccaatttgaacaacaaagagcaaatcgactgggaaaaaactgaacagagcctcagggacctatgggacaatcaccaaatatctaatatctgtgtcactgattagtctcagaaaggagggagaaagagattgggtctaggaaaagtattcagagagagtctgaagatctcagcaatactagctccctgcatttcccaccccacacatcctcagaagctagagcctggattgctgaattttagaaaagctctattagcctcgtgatgcagcagtccaacagcagtcagtgccacaccataagcccaactcaagaaaagagattttggccgggcacgatggctcatgcctgtaatcccagcactttgggaggctgaggcgggcggatcacttgaggtcaggagttcgagatcagcctggccaacatggtgaaaccccatctctactaaaaatacaaaaattagccagatgtggtggcacatgcctgtagttccagctactcaggaggctgaggcaggagaatcactcgaacccaggaggcggagcttgcagtgagccaagatcgtgccactgcactcctgcctgggcgacagagtgagactctgtctcaaaaaaaaagattttgataaagtgtgtatgagtttaaaactccttttctgaccctaaaaatttcccagttcactttcttttattctggtccctgaccatgatgcaaacctgagaaatccaccagagacataaagtggagctgtcagtaggactgcaccccaaatcaggcagtctaggctgtgtttgactgtggaagagagggaggcaggtggggccactctgacccgcagattttatgtcccgagaaggagcaaagaactctgccaccatcctgcttcctctaacaaagcccctgacagagcagtcatgagtaatgcttcgacctggagaccacctaagaattttatctttaaacagttaaagaagagctgtgattttcaaagtttctgccaatccttatattgttaaatgtgcattgccaacccgcagtttgtttgagagaacattttattgggactttttgttacaaaaggcaatgtctagggcagagtctggaatgagaaggttgacacaaaggaagctaaatagctaaattgttccatttaacaaatgatcggtaagttccacatgcagtaataatgtgtgttgtaaaaaggttttgtctgaaatgggtgggaggtgaatttaaggacttgaagaaaagggggaaaagactgtggcacaagagagcagacccacaaaaatagtagcaggccaggagccaaaaaaaaaaaaaaaagcataaaaaatatcagtcccctaaagcagaaatggctaatgaacttaggaaaggtgattcacttattctatttgaggtcgtttccttatttgtgctacatgaccaaaccttcaggtaaagtaaattctctgttacagccctgagttaatgatacagaaggttttgaaggaaaggtactcctttctggcttggaatgaattggtataggcaggagacaggtaccaggaggataatagctccagagctaaagaaagtgatataggaaatggatactaggaagtttgtcaaatgggagaatatataagccaagagcatcttgtacccacttcttttcactcattgactcagggaaatacgagaaagggtattagtcaactgcatcacttattgaatttgtggaagaagggctcatttattgaatttgtatttgaaaggacagcgtaacctcagaaggctgaatgacttggagctacttggctcacaaatttcttcttcctgaatatttttgaaatcttgcaacttacagtacttaccattgagcatcccaaagatttccaagtagatgtggggaaccttgtcccttagggtatggcatgagtttgtgcatgtgttctgctcagggttccctgtcaacaaatgagacaaatacaaaaattacataaatcttgcctagtaaatagagggaagatattctaagacaatgacaattaaaaaaaaaatagtccgtcaagttgtccttggctggacctaaccatcaatgagaaaatgcatgcacaggctgggaggaaaatcatattacgtgttatgtggaaacaaaacagaaaagtactggccttattaggttaccacttaagaaccctgccgcttaggctggtgtcttggtttgagtcttccccatagcagagcctaagacaaggacttagacttgggggcaagtggtttatttggaaggagatatcaggaagctgaaataaatgagcagaagagtgagaagaaggaaaggaaacataaggctgtgttataaatgtgggttttttctgccgggccctctgagaagcaaaccaaacgccctgcagtcatccccttccacctctcccacttctggccaaagacaagaggctgaaaattttctccaacagcttcccattgtccttggttaatgattgcccaaggacaaaaatccctgcctcttccagtgtcctctttcctgagccaaatcccaggaaaacaggagatagctgccagcaagagatgagtctctgaactctgagagattgtccactgacacagtggctgaaatcagtaaggggccgagaggaagagatgcaaagtaccaaaagcatctgccactgctcagcgttgaaagtggccatacaagttcacatggtgtccttgttttcagttcctatgtacttgtaagtggcagccacagagtagaattcagacttcctgtctccagagaagtgaagcttttcttcttcatcatgcctcctgcaagaattcaaccttcagcaaatcaactcatccacttttcaattgcatcatgatgagtagggttgaaagataatatctgtcaccaccctcaagaagtgtgtaattcactgatagaaacagacatataaagagatcgattttaatagcatagtgaggatgagagaggtacatacacagacacaaggcactagaaaaaggcagagatggctccctgagcccagcctagaaagtggaacacaaatgcctgaagggggcgttacaggtgcatagaagaacatgaaaaagaccgtagtaaaaagcaaaccaccatgctgtgtgcttctgtttttctcgtttgtttcttccaactgtttttgaattgacaaataaaaattttatatatttatggtgtacaacgtggtttaattttatgtgtacattgtggaatggctaaatcaaacaaattaacatatgcattacctcacactcagtaattttcaagtatacagtatattgttattaattatagtcatcatgatatataatagatctcttgaacttattcttcctgtctaactgaaatgttcctccaacttttggaactgatgatagctttttcttcacagtttttaggtgtaataactttcacgtttcatcccatgaagacaggctatttctgtctttcttatttctctactcccactacaaacttaagagactctccatatttggtaaatgatttaaagaatgaaggaaggagtgatttttataatctctttaaattctataacctacaagaatattaggatcatttcttattagaaaagacagattcatcaattggtggcaaacatgaaacccaggaggtttcacactgtatctctaagacacttaatatttatcttccctgaaaccatagggaattgatgttccagaaaaaaaatcattttacgtgtgtttttgtcatctaaaaagtatgttttgagtagtttattagaattatttggatatttatgaatattaaggctttattcatcacaaacaatacggaaataaggggaaatatgagagtccctttgcttctctctaagtttttagcctcttcttgaatatgtgcccatggtgcctggtgcctgcaagtgttttttgtgaaggtgggtggttttgatgccctgctcatggcattggccgttaattgaacctgaccttggcaagtactgtcgacagtaacagtagcttgtctacattcccaattcaacaacagccatgtgctttaaggttatgttttttatttttacttttaattttgtatactttggtagcattcaatttatatgtctgaattattttttaatttaaatataaactagtatatcagttacttatccaaaggaataattcttggtctatttttaaagcatttttgttgaattggtgatagattggttcagacacatctatagttaagaggctttggtttagttctgaattacagcaggaagttgcaaaatactatataagctcaggaaagtagtctattttcatggagcaaatttcagctagccaatttttctagaacagtcaacttgaagatttcatcctttccacaaaaactaattgattatctactatgggtcaaacattgtgctacatgtttattccaaatatcaataggttcaaaattaaatttgctatttatattatattggaaaacattttgaagcttcataatgtatgctaggtctataaatatactagaatgaaggacagcaatcagtcagcatgaaaccattctttttgtattctacagctaactgaacaaggaaggaagaaaagtgatgtctgagtttgctaatatgttacatatctatgagcaccagaaatgaggtctaatagttaacaatttataaatcaaagaaagatttatcctgggaaattgatttctatttgaacacgaatgtattaataaaaattctgatataagtagaatagtttcatatttaccagtatcttggcatggtccctttaaccactctatttttgattatttaaattaaaatgataaagagaaagggaaaagagatagaatattaagaaaattaccactggaataaagacgtttgaatagatttaatttaaatgactttaaaccattttagagaattattctggtctgattcattaatctaatattattataaatgattacattaattttactaaatcctttttatcaacaatgtgatcaacttggtagatagatgaagaaaaacacaaaaatcaaatctaactaagttcaaagttgtgaccagaacctagtcatgtcagttatttataatcatagagtttgagcttaggaaataaaaatatagttatgacctttaaaaattgttatggaaaatatcctatctcaccaatttctctcttcttagtattcccttatagccatttttttctactttgcattattttaagcttttatgttttaagtatagatgagcttttttatttaccaaaaactctcctttctgcctcaaacacctttttctctgtgtctctttctctcgttcacttttacatacacacataccacacatgcagtcttcttattttcggtcctataatcaatgaaccgtgaaacatttgttctttgtcgcttccctttttcactttttagaaaaggaatattatatctgtttctacataagaaagtcagtggaaatttgaagtaaacttctagatgactatccatagtatacatttttttaatatcaagaaaaccaaagcacatgtcaattttatgcccctaattattcaaagtttgccttcactatacttattccaaatgataattgtgaagaaaaagcagcatttgtagcctttcttctcaatgatattgaacataccttttatcgtggagctgctggagaaaaacagtagaattctcctgttgttgaatcaaaatcaaattccattttccagagattgtttcatatttgttcctaaaataataatgacagctcctcacatccaaataacatgcagaaaaaaatatacatgcaattgccaggaagaactaaaaattttttcaaaacctttctgggttctctaatttctatttagaaagtcactgaagtggcaagacttcaaataaggaaattccccactgattgtaagttttgtaacttatactggatcagagaagcctgaagaagctgggatccctggggacgcaccctaggaggttatctcttctgcagtagtgactttcctctctacatagagaatgttctataggactgacaagcccctatgaaaataacttggattttagatatcataaaaaagtgcgatgcaaatcctcttcccttctattctttctattcctagcttcatggaatcaacctatttccaatcatttttctctacaatcttgtaactttaactataaaaggagacaccatcccattgtttattttgtgtttatttagaaacttctatgatttctaattatttacaaggaaaaggaatcactcttttaaaatatgcagagtgtaaacataaaggacaataagagagagaaaggagacacaatatcaagaaacgcacagctggaataaaaatatcttgaaaagaatgaacctgtctataattatgcccacttcttctgtagttatttaaagattaccccatgaattgaaagaggaagcttaggtgattcattacagtaagaaaaagaataaaaaaacagagttatgctaactttcttttgggtctcccaccttctacatctcaactactacctaaatgtatatcacagcatcattagcctggtcttgtaattcacagtggccatcttcccccactccgggaggacttgatctatttaaaatgggcttcagcctttccaagttctacctctttttactgaattccttggtgtttccagtatagagacaacagaggaaatacaatgggttcaaaagccagatacatattttcccaactgtaacttccatgaatcccacaatccccaaagtataaaacccacattcacaccttgtgattcttgcaagtgactcccatctgggaataaggtgtgggtaaagatgaatgagaagaacttagcgagagtcagggctgtaacttcacttgctttagaggcaatgccaatcattggtatctggtcacatatttggtatttaatacacttatttttgttttttggttttggggttttttatgattaattcattttattttatttttttaatttgtcaattttttatttaaataggtttttggggaacatggggtgtttggttacgtgaataagttctttaatggtgatttccaagattttggtgcacccatcacccaagcagggtacactgtacccaacatgtagtcatttatcccttgccatcccctaccttctcccctaagtccccaaagtccaatgtatcattcttatgcctttgcatccttatagtttagctcccacatattagtgaaaacaacgatgtttggttttccattcctgagttactttacttagaataatagtctccagttccatccaggctactttaaatgctattatttcattccttttaattgctgagtagtattccatggtatatcattcaggctggttccaaatttttacaattgcaaattgtaatacacatatttttgatagaataaagaagtgaagaaatgaaagtacagtagcaacacatcaaataaaacagatacctggaggcataaatatggcatcttggagacacatttttttttggatagactaagataaaacattgatgctgttgacttgtctcagctgtaagtcagccacatctggccctcatctctctcttggcaaaatttctgctaaactttattagttttcaacttttctcttgttaatgacttcaaatttttctcattattaaataatttagtatagtgtctgatcaaaatccttctttgaattgtgatagagaaatcaaagtgaaaaaataaaagtcatttgcaaaatcactgtggtgactcagctgtcgaaaataattcaaactggactttcgatatactaacatatagccccaaatagtatcaaaattattatttgaccaccggaagaggcctactaagtatccctatccataatagaatttaagtcatttcttaaccagaaaatacacaaaacaagtctatgtactgaaattgacctgtatactaagtaggaataaggaaatttagtccttttgttcaaatctatgaaaaattgcttcctttttgggcggatctgttccaaaaagtgttttgtttgactttaccaaatctaccatttgtttgagatttagtctggatcttttcaaatgaaaaacatgaaagtttaagaaagctttgctcaataccacacaaagcaaaatatttcttcaacatagaatttactactcaagcattttttttctagttaactgcacaaatcagatttactggattttaatgaaagtaattatattaagaattaacaacattcttcaaattgtggctcataaaatgtttgctaaataccccatttaatacttccattgaaaatttcctattcatttcttaaccagagttacggagaaacacattaaattatattaagttcaagtgccaagtaattaacaaaaaaaaaaatttgtttagtatgtctgttttatatgaccctcaatatttaatcatttaaatctcacttctaattatgtctattaatattattaaacaaactttagcctgacaataaatacaaattcccaagtaagtattagaccactctagggtataatagtatttctaatctgatgtttacctatgttttgtttttcatctacaacactgactttttttttaagtggacacagtagttgattgtgaagtatttgaatgtcacacaagaaatataaatgtgggtgctgacctcaaagcacacagaagctagggatgatagggttttcacatagtttaaggcagattctaatctgaatggtacagccaaaaaataatttttttaagggtagaagtctttgttgactgaaaaatagttaagctcaaaaaaagggtgaaagtcgaccttatctactgaagacaatgagacaatgacaggaattctaggggtcccatatttgcagatacggaggttgggtacgagttaaaaggtcacaacacagatgtagatgtgatgcttttcatcatcaaaagcatggtaaaaactctaagtagataaaactctgtgaagggattggtgtaaaaaggagaagagaaagctaaggaccaatccttgagacactccaatgactgtgatgtaggagggaaaagcgggacccgtgaagaaaagattgaagatgttgtggtgacacataatagaagagcaagaagtttttcaaagacgaggttctcaagaaaatcacatgcagctgaatgacccaagaggtggaagattttaaaaggccatttattttcactagcaatatgtcaccaatgagccatttcaggagtctatgttccagtaggctaagattcaatttcaaagtttacaaataaaatgaaatgaaaaaaatgagagtaagcatagactactcattataagagttgatcatgaaaagaaataaattttaagtttattaaataggtatcaatatccaaagaaaaacgttgatttctttaaggcaagtgatccctgggcatgactggtaacaagaaagaatttaaaaaggaaagactgaggaccctaagaagagtggagtgtggcaaggtgtgggagcaatgtctgaaaagccacaatcaaggatgtgtcccaaagcagagaagaaaggttgacttttaaaattagaataaaagtaatactggttaacatttattgagcagtgattatttgcacagaactgtttaaatgctgaatgtacattatctccttaactacttatgaaaaccttacaaggtagatatcatcattcccacttcccctacaaagaaagtgaaaccaaaataaattaattccccatgatgtcctagaaagtgtgaggtggtgtccaaacacagacctatctgactcaagctcatgcactgaaaatttctgtttctgattcattgctcagtgtcacaaggtgtaagaacacaattctaactttgtttgagtggtagaagttatgttcttaaagctaatatactaacatataatttgaacactcacagcttctgaaactgaaaatacacattcttcatccaatgtttgctgtatagtgtatgctcagaggggactctgaaagtggaaagggataaattcttactcctagggcaattccttctaatgaggagaaatcccttgatttccttgggtggggtacacaaacagagaaagatattaaataaggcttatttttataattttatttcaaggagaaaaaaaaatctcttctactatgccacctcttttgtgaatattggagtggtgtataaaccctgaacttacgcctctctcctgagccaactctaaccacactaagccctatcaccatgaggaggtgatagggcttttttaaataactttttgagaaacaaaagttattaaactgaagagaaatgttatctcaatcatcattctggtgctaaatccaaaagattcttttcagactttttcacttctctgtagaatatgaagctgctcctcatcccttctagtcgttctcacctccctttgttttattgactatagtcatttaataaatctacatgcttttcacatacttttcacaggctcctctcctctacccaccctctaaatgttggagcttctttgctcatcttctcctttctgtttcttcacactgtccctaaaaggtctcttcctctctactgacttgaactaccacctctatgctgatgagttccagaagcatatctttagcttggacctctctgcagagctccagatacatatgtactatcctaaacctccctctctgggtgtcctgtagaggtaccccatcattttcacaataaactgttcctcctgtatagccattcgtttgatcaaacactcagtcgagacagaaaattagttattacctttgagggtgttttcttctttattcatctcctcttcacattcaattcaaccagtaaattcagtaaattctgttctaagtattcctcaaatcttctcttcctcttcatcctaatgatcactgtcttatttcaggagtcatcttttcttgcatggaccagtttttaacagaaaactctggtgtccctgcctccagtcttggtcacttccaaatctgatctgcacatggcctccaaagtgatatttctaaaattcagatttaatcatattactcgtattcataaaatcatcaacatcttcccattgatttatagaaaaattcaatctgttaagggtgctataaatgatgccatacaaggctcctaccctttactctcatcctcaatcactcccgtattttcactctaggtcccaactttacaaaaatgatgtgttgtttccagaatgtgcacactccctgcccaatgactgaaatatggctgccctccatcactgtgggttgcctgttactcccccaccacaattaccttctccagaatgccttgtctcatcctgtcaacccagcttatgtgccttctctatagcctcttagagtctatactttctttcattgtaacctgctcggtttattactaacaggtttaccagtatcattagaatctcagtcacttaaaggtaaataatggtatctggaagcagtagaatatattaattaagagaagcagatttggaacaaaataaacttggatttgactcccgaaacatccacttacttaataattgtttatgtgcagagggggccaggtaggttcatgtctctgaactctagcctctgtatctataaaatatacccgatcataccttcttctgagtgtttttttttttttaggattaaaatgaaatagtacatagtaagaccttgacatagtacttgaagcatgttaaaatgatattgtcttatcccattttgcccaacatgtagccacctagctactacatcgtaagtatttagaaagtacatacatttgttaccagtgccccatgatagcagtgcctgatgaagtcataatgcaatggagagcaaatagaacaagtggagtcttctgaatcctaatgcactttactgattctagaaagaataaatgagaggctatgcaaaatctcaagctcagctaaggaatatattttgttgaaggtttgtgcttccattttatggtgattggaaagggactgagctagaaagaaactgagctagaaaggagctcagttcctctccaatcatcacaaaaatttacattccatagtatgcaacatcttgtcaggaaaaacaaatataatccttcacatgcaatctttgctcacaattatgagatactgtctttatgggtctaaatcagaaatactgtcttcttacagactcttgatgtgatctgtgctcatccttaatccttggtaaagttccaaaatggctctggatcctactgacatctgttactaaggataatgcatgaaggagatgaagatatctgttctcaataaacagagaaaacattactaaagaaaatgtagatcaatttcagatctccttatccatagataaggaaatgcaagttattagagacctatgaaaaattgctgttcagacataaagatgcatctttttatttcagatctttaccacttaagtttagcctagtattttttaaggccaatgaaacagttggtgaaaaagaataaatgcatttgtgatctccagtgtgttctctccattctagcaaaaaaaaaaaaattccaaaaacacttgttcatacagctacaagtttgaggcttttcataggaaataagatttgaggtctagactaattgattttatagcttcacaactgaattttgtaatgtagccacaggtccatacacagcagaagcttagattaatcctttccaaaaataaaaggaaaaaatccatgtgaatcacttctaaatgcctctgtattgcaaatgaatgatgtttgggtgtgcatttatactacttgtctaagataagacctatttaacaagatatagtttatacctcattaaagcaacatctacttctcttgcttggttactggtctttcacagccagtccaattggccaatataaaatacacttccattctgaaacctaagttccacaagagaaagaacatttttctttttaagtagatgtatttcattatctttaagagtttatattatatacatgacattacccccatttaatttttgtgctggtcagggattattcagtgatgaaaaaagttttcccaaatgagggcaaataaaaacatttttgctggaagactataaaggacaacttcatagacattcaaaagtgaaaaataaaatacacccagacctcttataaatatattgggaactggaaaatcagaaactgagatcatctctcttaattcacatgatttctcatctccttctcactagtacactttacctcctgatttctggtccaatccattgaacccatttttttcactcaatgtgagtaaatgtcatataaaaggttgcaggaagatgctgcttcaggccattttctctaaaagagacttgtaagtacagaggtcattgaagtttcatgaacttctttatcctttttgatcaagtagcagattacctctaactagtccacagcttccacatggaagatggacaaacatatagaaatggggaagaaagaagaaccaacacacttgtcagcaaattcaacctaagtcagcctcttttcaatgggctcatgggaaatgaagcatttcctgggacacagaggagggagagaaaaatctcccattattggggattgaaccataagaaaatgttgtttcatggccccaaatggccaaataccaacatattatgtgatccaactaaatcacaatggtataatcaaacaagttattctgattattaccaatagagacactaaaattttggctgtgtattaaaccctcttgcttttcacatcttctcaatgtatttattttatagcacatctggaacaatccttttatttattaatgaagatcgtctcaattgccaaagtctatatttttcttccacttaatgaaaaatatccaaagttgctggttatgggcccatcagagattattttctcttaatcatatttcatttaaaaaaaactagtcagttcatttttctaaaaaaaaaatgcatgttcagaaaaaaatacaatcactgaaagcccaaatttccagtacaatttaataacaaaaaaggacggagtggagtaggatagtcacatggttcctgttatccacccccaagcttaagaaacagggaggtctaaaatgtagtgtggaagagtaaaaacagcatgacctgctttcagttccaagttcttccttctactgattgtgcagtcttgggcatgctgatgaatcaaatcaacctctctggctgcacatggaaattgaggaatgaaaatacttctgaggtagggttgatgtgagcattggttgagacaatgccttcatttgttgagtttctgttatgtgccagcactttactacaacagagatgcaatagtgaaggaaaagagaaacacaagccctttaagacttcttggcatttctgatctgacaggtggacacagacaataatcaaaggattatatgaataaatcccaattatggtaaattctctgaaagagaatagtgtcctgagaatgaggggtgggagggagaggggcaagtaaacagaacagattgtatggccagaaagcatatgattggaccaaggagaacacaaaagacctgtgtagctaaatgaggagaagctagatgtgaaatggggcgtagaaattagggtccagaaattaaaactttaccgtagattttctgggacaataatttttgaactttactcaataaaatgacaaacaattcaatatttttaaagagtaatgatacgatgaggcttgaaattcaaaatgccagccttgctacagtgcagataagaaattagaaaagggtcgaaaggatgcaggaagctaatctattgatccaggtgagggacatggcaaccttgaatcatgtactggaaaaatgatgtcttactctctagattcctcctctctgagcagggcgtctccgaaagaaaggcagcagccccagtcagtggcttactgataaaacttccatctccttgggacagagcacctgggggaagggacagctatgggggcagcctcagcagacttaaatgtttctgcctgccagctccaaagagagcagcggatctcccagcacagcactcaagctctgctaagggacagactgcctcctcaagtgggtccctgaccctcgtgcctcctgactgggagacacctcccagcaggggtcaacagacatgtcatacagcagagctctggctggcatccagtgggtgcccctctgggaggaagcttccagaggaaggaacaggcagcaatctaggctgttctgcagcctctgcaggagatacccaggaaacagggtctggaatagacctccagcaaactccagcagacctgcagtagaggggcctgactgttaaaaggaaaactaacaaacagaaaggaagaacatcaacatcaacaaaaaagatgtccaaacgaaaccccatccgaaggtcaccaacatcaaagaacaaaggtagatgaataaatgaagatgaagaaaaaccaggccaaaaaggctgaaaattccaaaaaccagaacacctgttttcctccaaacgatcacaactcttcgccagcaagagaacaaaactggacggagaatgagtttgatgaattgacagaagtaggcttcagaaggtaggtaataacaaactctactgagctaaaggagcatgttctaacccaatgcaaggaagctaagaaccttgaaaaatggttacaggaattgctaactagaataaccagtttagagaagaacataaatgacctgatggagctgcaaaacacagcacgagaacttcgtgaagcatatacaagtatcaatacctgaatcaatcaagcagaagaaaggatatcaaagattgaagatcaacttaatgaaataaagcgtgaagacaagattagagaaaaaagaatgaaaaggaaagaacaaagcctccaagaaatatggaactatgtgaaaagaccaaacctgtgtttgattggtgtacctgaaagtgactgggagaatggaaccaagttggaaaacactcttcaggatatgatccaggagaacttccccaacctagcgagacaggctgacattcaaattcaggaaatacagagaacaccacaaagataagtcttgaaagagcaacccccaagacaaataatcatcagattcaccaaggttgaaatgaaggaaaaaatgttaagggcagcaagagagaaaggtcgggttacacacaaaaagaagcccatcagactaacagtgaatctcttggcagaaaccctacaagccagaagagagtggggaccaatagtcaccattcttaaagaaaagaattttcaacccagaatagcagatccagccaaactaagcttcataagtgaaggagaaataaaattctttacacacaagcaaatgctgagagattttgtcaccaccaggcctgccttacaatagctcctgaaaaaagcactaaatatggaaaagaaaaaccacaccagcccctgtaaaaacataccaaattgtaaaaaccatcgacactataaagaaactgcatcaactaacgggcaaaataaccagctagcatcataatgataggatcaaattcacacataaaaatattaaccttaaatgcaaatgggcagaatgctccaattaaaagacacagtctggcaaatctgatacggagtcaagcccatcagtgtgctgtattcaggagacccatctcaagtgcaaagacatacataggctcaaaataaagggagggaggaatatttaccaagcaaatggaaagcaaaaaaacaaaacaaaacaaaacaaacagggtttgcaatcctagtctctaataaaatagactttaaaccaacaaagatcaaaaaagacaaagaagggcattacataatagtaaagggatgaatgcaacaagaagagctatctatcctaaatatatagacgcccaatacaggagcacccagagtcataaagcaagttcttagagacctataaagagacctagactcccacacaataatagtggaagactttaacactccactgtcaatattagacagatcaatgagacagaaaattaacaaggatatccaagacttgaactcggctctggaccaagtggacctaatagacgtctatagaactctccaccccaaagcaacaaaatatacattcttctcagcactacatcgcacttattctaaaagtgaccacataattggaagtaaaacactcttcagctaatgcaaaagaacagaaatcataacaaacagtctctcagaccacagtgcaatcaaattagaactcaggataaagaaactcactctaaacctcacaactacatggaaactaaacaatctgctcctgaatgactactgggtacataacaaaattaaggcagaaataaataagttctttgaaaccaatgagaacaaagatacaatgtaccagaatctctggaacacagctaaagcagtgtttacagggaaatttatagcactaaatgcccacaggagaaagtgggaaagatctaaaattgacaccctaacatcacaattaaaagaactagagaagcaagagcaaaccaatttaaaagctagcagaagacaagaaataactgagatcagagcagaactgaaggagatagagacacgaaaaacccttcaaaaaatcaatgaatccaggagctagttttttgaaaacactaacaaaatagatagacctctagccagattaataaagaagaaaagaggaacaatcaaatagacacaacaaaaaatgataaagggaagatcaccactgatcccagagaaatacaaactaacatcagagaataccataaacacctctatgcaaataaattagaaaatctagaagaaatggataaattcctggacatatacaccctcccaagatgaaaccaggaagaagtcaaatccctaatagaccaataacaagttctgaaattgaggcagtgattaatagcctaacaaccagaaaaaggcccaggaccagatggattcacagccaaattctaccagaggtacaaagaggagctggtaccattccttctaaaactattccaaacaacagaaaaacagagaatcctccctaactcattttatgaggccagcatcatcctgattcaaaaaacctggcagagacacaacaacaaaaggaaaatttcaggccaatatacctgatgaacatcgatgcaaaaatcctcaataaaatactaccaaactgaatccagcagcacaccaaaaagcttatccaccatgatcaagtgggcttcatccctgggatgcaagtctggttcaacatctgcaaatcaataaacataatccattacataaacagaaccaatgacaaaaaccacatgataatctcaacagatgcagaaaaggccttcaataaaattcaatacctcttcatgataaaactctcagtaaactaggtattgatgaaacatatctcaaaataataagagttatttatgacaaacccacagacaatgtcatcccgaatgggcaaaagctgaaagtgttccctttgaaaaccagcacaagacaaggatgccctctcaccactcttattcaactcagtattggaagttctggccagggcaatcaggcaagaaaatgaaataaagggtattcaaataggaaaagaggaagtcagatagtctctgtttgcagatgacatgattgtatgtttagaaaaccctatcatctcagccccaaatctccttaagctaacaaacaagcaacttcagcaaagtctcagaatacaaaatcaacgtgcaaaaatcacaagcattcctatacaccaataatagacagagagccaaatcatgagtgaactcctattcacaattgctacaaagaataaaatacctaggaatacaacttaaaagggatgtgaaggacctcttcaaggagaactacaaaccactgctcaaggaaataagagagtacacaaacaaatggaagaacattccatgctcatggataggaagaatcaatattgtaaaaatgggcatactgcccaaagtaatttatagattcaatgctatccccatcaaactaccattgactttgctcacagaattagaaaaaaaaactttaaatatcatatggaaccaagaaagagctggtatagccaagacaatcctaagcaaaatgaacaaagctggaggcatcatgctacctgacttcaaattatactacgaggccacagtaaccaaaacaacatggtactgtaccaaaacagatatttagaccaacaaaacagaacagaggcctcagaaataacgccacatgtctacaaccatctgatctttgaaaaacctgacaaaaagaagcaatggggaaatgattccctatttaataaatgctgttgggaaaactggctagccatatgcagaaaagtgaaactgaaccccttacttacaacttatacaaaaattaactcaaggtggattaaggacttaaacgtaaggcctaaaaccataaaaaccctagaagaaaatctaggcaataccattcaggacaaaggcacgggcaaagtcttcatgactaaaacaccaaaagcaatggcaacaaaagccaaaattgacaaacggtatctaattaaactaaagagcttctgcacagcaaaagaaactatcatcagagtgaacagacaacttgcagaatgagagagaatttttgcaatctatccatctgacaaaaggctaatatccagaatctacaaggaacttaggcaaatttgcgagaaaaaaaaaaaacaaccccatcaaaaagtgggcaaaggatatgaacaaacacttctcaaaagaagacatttatgtggccaacaaacataagaaaaaaactcatcatcactggtcattagagaaaggcaaatcaaaaccacaatgagatactatctcatgccacttagaatggtgataattaaaaagtcaggaaacaacagatgctggaaaggatgtggagaaataggagcgctttcacactgttggtgggaatgtaaattagttcaaccattgtggaagacagtgtggcgattcctcaaggatctagaactagaaataccatttcacccagcaatcccattactaggtatatatccaaaggattataaatcattctactataaaaacacctgcacatgtatgtttattgcagcactgttcacaatagcaaagtcttggaaccaaaccaaatgcccatcaatgatggactggataaagaaaatgtggcacatatacaccatggaacactaagcagccataaaaaaggatcagttcatatcctttgcagggacatggatgaagctggaaaccaccattctcaggaaactaacacaagaacagaaaaccaaacaccacatgttctcactcataagtgggagttgaacaattagaacacatggacatagggaggggaacattacacaccggggcctgtcgggggttgggggcctaggtgagggatagcattaggagaaatacctaatgtcgatgatgggttgataggtgcagcaaaccaccatggcatgtgtatacctaggtaacaaacctgcacattctgcacatgtatcccagaacttaaagtataaaaaaaaggcctggcgtggtggctcacacctgtaatcccagcactttgggaggctgaggcgggtggatcatgtggtcaggagattgagaccatcctggccaacatggtgaaaccttgtctgtactaaaaaaaagaaaaaagaaaaaagaaaaattagccaggcttggtggcatgcacctgtagtcccagctactcaggaggctgaggcaggagaatcgcttgaacccaggaggcagaggttgcagtgagctgagatcatgccactgtactccaacctgggcaacagagggagactctgtctcaaaaaaaaaaaaaatcctcaatatattactcatcttttaacatcttttactcttccttttttaaaaaaaaatctctatctctctatgtatgctatagagaaaacatttttgtatttccttcaaattccctaattctctttttaattatgcccagtcaagttattatcctgttgaatttattagatcaactataagaaaaaaaaactaatgtattgatgtgttgggttgaatgtggagaataaagggaagggataagagctaactcaaaagtttcaggctttggaactagatacaagtttgaaacactgaaaaagaacaagatgtgtgataggaggccttggagattgtgatattttgggggacatgttgaaaatgggatgtttctgagacatacaagtggaagaatcaaccaggcacctaattattcatgtctggagctcagtaggaaagccagcactacaaagacaaattgtgaattctatgatgtctttgtattaactcaggctgtacatgaaagtgtaaagagatttcctagcagggagagcatagagtgtgaagaggagagacaaagattgagctcgacccaggaaaggacggaatgtgcaaaggagtcagagacagagcatctcaggcagtaagagcaaaccaaaaaacaatcatgataaaaattcattattttaaaaaggagactgtggctacaaccaccactaacatttcttcctctgctgtctccacattgtaaaaggaacataaactcagattgccccagagccgtggtgggcagttcaggagtgccaagctgggctctacagccagcactcaagtgggagaggagcctacactcagagtattgagaggggcatggctgcaactgtgagaaaatataaggaagccacatgactgagcaagagcccaccaactgatcaatacacctaagtaccacctactcgatcacacctcaaggcttcaacaccaaaaatacctcattaacagactcctttgagaaaccaaagacaaaaagtcagctacaaataaagaccctgcacaaaggctcagctccatgaaaacacacagaaaagaagtttattgactgtatcaatctacactacagttaaaggaacacccacatgcagagatgagaaagaaccaatgcaagaatactggtaaccggtaactcaaatggtcagagtgtcatatgtcctccagatgattgcacctgttctccagcaagggttcttaaccctgttgagctggctggaatgacagtattcagaacataaatagaaatgaagatcatcgagattcaggagagtggcaaagcccaatccaaggaaactaaaaaccacaataaaatgatacagaagatgaaagatgaaatagccagtatatataagaacctgagagagctgacagagctgagaaacacactaaaagaatttcacaacacaattacaagtattaatagcagaacagaccaagctaaagaaagaaaattagaacttgaagcctggttctctgaaataagacagtcagacaaaaataaagaaaaaacaatgaaaaggaatgcacaaaacctccaagaaatatggaatcgtgtaaagaggccaaatatatgaatcactggcatccctaaaagggacgaggggaaagcaaacaacttaaaaaacatattttaggatatcgtctatgcaaactacctcaccttgctagagaggccaaaagtcaaactcaggaaatacagagaacccctgcaagattctccccaacacacataatcatcagaattttccaaggttgaaatgaaaggcagaatgataaagacagctagagagaaagggcaggtcacctgcaaaaagagaacaccatcaggataacagcaaatctctcagctgtaaccctacaagcaagaagagattgggagcctatattcaacatttttaaggaagaaatcttcaaccaagaatttcacatcaagccaaactaagctccctaagcaaaggagaagtaagatccttttcagataagcaaatgataagagagtttattaccaccagacctgccttacaagagatcttgaaagcactaaatatagaaagaaaagaccactaccggccaatacaaaaacacttaaatacacagaccagtaacactataaagcacaatacaaacaaaccagcatagtgaccagctaacaacacaatgaaaagatcaaaaccacacatgtcaatactaaccctgaatataaacaggctaaatggctccatttaaacggtacagaatggcaagctggataaaaaggcaaaactcaatggtatgctgcaagagaccaatctcacacataatgacacccataggctcaaaataaaaataaaaaaatggaggcaaatctaccaagcaagtggaaatcagaaaaaatcaggggttgaaatcctaatcttagacaaaacagactttaaatcaataaggcttttaaaaaaaagacaaagaagggcattacataatgtaaagagttcaattcaacaagagttcaattcaacaatttaactatcctaaatacatgtgcacccaacataggggcatccagattaataaagcaagttcttagagtcatacaaagagacttagactcccacacaataatagagacttcaacattccactgaaagtattagacaaatcattgaggcagaaaattaacaaagatattcatgacctgaactcaacattggaccaaatggatctgctagacctgtacagaactttccacccaaaaacaacagaatatacattcttctcatcgccacatggcacacacgctaaaattgaccacataattggacataaaacaatcctcagcaaatgcaaaaaaaattataccaaacacactcttggaccacagtgcaataaatatagaagtcaagactaaaaaaaaaattgccccaaaccatgtaattacatggaaattaaacaacatgttcctgaatgacttttgggtacataatgaaattaagtcagatgtcaagaaattatttgaaactaatgagaacaaagctacaacataccggaatatctgggatacagctaaggcagtgtaaagagggaagtttatagcactaaacacccatgaaaaaaagttagaaagatttcaaattaacaagctaacatcacagatgaaagaattagagaagcaagagcaaatcaatcccaaagttagcagaagacaagaaataacaaaaatcagacctaaactgaaggaaattgaaaccaaaaaacccttaaaagatcaatgaatccaggaactggaattttgaaaaaattactaacatagagcactagctagactaataaagaaaaaaagagaataaatccaaataaacacaattagaaatgatggaaaggatacaccactggccccacagaaataaagataaccatcagaaactactgcaaacacctctacacacacacactagaaaacctagaagatatggataaatccctggaaacatatgctttcccaaggctgagccagaaagaaatcgattccctgcacaaaccaataatgagctctgaaactgaatgaataataaatagcctaccaagaaaaataaaaaggacaagatggattcacagtagaattctaccagatgtacagagagagctggtaccattcctactgaaactatcaccaaaaattgaggaaaggggactcctccccaactcattccatgaggctagcattatcctgataccaaaacctggcagagacacaacgaaaaaagaaaacttcaggccaatatccttgatgaacattgatgcaaaaccaacatccttgatgaacactgatgcaaaaatcctcaacaaaatacttgtaaacaaaacgcagcagcacatcaaaaagctagtctaccacagtcaagtaaacttcatccttgggatgcaaagttggttcaatgtacacaaaccaataaatctaattcatcacataaacagaactaaaggaaacaaacatgattatctccatagatgcagtaaaagtttttgataaaattcaacatctcttcgtgttaaaaactctcaattcactaaatattgaaggaatatacctcaaaataataagagccacctacaacaaacccacaaacgacagcatactgaacagggaaaagctgaaatcattcccctggaaaactggcacaacacaagaacgccctccctcaccactcctgttcaacatattattggaaggtctggccagaacaatcaggcaagagaaagaaataaagcatatttaaataggaagagaagaattaaaagtatccgtttttgcaaatgacatgtttttatatctagaaaaccccatagtctcagcctaaaatctccttcaaatgataaacaacttcagcaatgttgcaggatacaaaatcaatgtacaaaaatcactagcatttctatacaccaacaacagcctagctgagagccaaatcaggaattgaatcccattcacaattaccacaaaaagaataaaatatctaggaatacagcaaaccatggaggtgaaagatctctacaatgggaattccaaagtgctgctcaaagaaatcagtgatgacacacacaaaaaatatgaaaacatcccatggtcatggacaggaagaatcaatatcattaaaatggccatactgcccaaagcaatttacagattcaacgccattcctgtcaaactaccagtgacattcttcacagaactaagaaaaaaaaactattttaaaatttatatggaaccaaaagagggcccaaatggccaaggcaatcctaaatgaaaagaacaaaactggaggcatcatgttacccaactccaaactatactatgtggctacaataaccaaaacagtatggtactggtacaaaaacagacacatagaccaatggaacagaatagagagcccagaaacaagcccacacacctatgactgtctttgacaaagctgacaaaaacaagcaatggggaaaggactccctattaaataaatggtgctgggataacaggctagtcataagcagaagattgaaactggactccttttttacatcatatacaaaaatcaactcaagataaattaaagatttaaatgtagaacccaaaaactataaaaaccctagacaacttaggcaataccatcctggacacaggaatgggcaaagattttatgacaaagacagtaaaagcaatcataacaaaagcaaaaattaacaaatgggatctaattaaacttaagagcttctgtacagcaaaagaaactatcaacagagtaaacagacaacctacagaatgggagaaaatatttgcaaactatgcatctggcaaaggtctaatatccaacatctgtaaggaacttaaacaaatttacggaaaaaagcaaacaatcccattgaaaagtggacaaaagacataaacaggtatttttctagaaaagacatacatgcagccaaaaagcatattttaaaaagctcagtattgctgatcattagagaaatgcaaattaaaaccacaatgagatattgtctcacaccagtcagaatggttattataaaaaagtcgaaaacttacagatgctggcaaggatgtgaagaaaaaggaacacttatacactattggtggtaacgtaaattagcgcaaccattgtggaaagcaatacggtggtttctcaaagagctaaaagcagaaccactgttggacacagcaattccattactgggtatatacccagaggaatataaatcattctaccataaagacacacgcatgtaaatgttcattgcagcactattcacaatagcaaagatatggaatcaacctaaatgcccaacaatgacagattggatcaagaagatgtagtacacatacaccatggaatactatgcagctataaaagagaatgagataatgtctcttgcagaacatagatggagctggaggatattatcctaggcaaactaatgcaggaacagaaaaccaaataccacatgctctcacttataagtgggagctaaatgaggagaactcatgaacataaagggaacaacagacattagggcctatttcagggtagagggtgggaagaaggagaggaggagaaaaaaatagctattgggtactaggcctagcacctaggtgataaaattatctgtacaacaaacccccatgacacgagagcttacctataaaacaaacctgcacatgtaccctcgaatctaaattaaaagtttaaatagtagaaaatcacaaaatttaaaaaaagaaaatagccatacttaccatgcttatggatttgctggtgttcatacttcttaagggtagaatattttaaacaattgggagaggaatgggaccaggtaggagcttccctttggcatagcttccattccatagaaaaagaagaatcaaacaagaaggacaaaacacccaatgaagcgatccattgatgtgctttgtgtaaacgcaattgaaagcttagaatccaaatattttatgagcacaaagtgtaagataatcaccaaacatggactaagcctttgaactttggataaatattttttaatctttgatagacttccatctacaggcagaaataaaaacaaaagtcaatttggtattgatcaattgctaagttttcactggaaatttcaactaaaggtaactcacttttataaaaatatgaacaaattaaaaccaaaattagtagaaagagtgaagtaataaagctcagaacagaaataaatgaaataaagatttttaaataatttataagatcaacaaaatagttattttttgaaaagatgaacaaaattgactaacatttatatagaataactaagataaaattgaaaagactcaaataaataaaatcagaggtgaaaaagaagacattttgaccaacactaaagaaatacaaacgatcataagaaggtatcatgagtggctatatgtaaacaaaactgaaaacatagaagaaatgaataaattttgttacacatacaacctactaaggttaaattatcctttctgatccaaaaaaatagaatattaagagcaaaaattatgtagaatgtctgggacatttttcatttggattaattcactttgaattaaaataacagcaactaaaagtcatctgaggattcagtgataattcaaattgcattttagttctaaagcaattaactttcaaaactctcagttttagaaggaaacactatcaaatggacatgctgcctaggatggtgcctttagacgaaggggctgagtaaacattcgatgaattaatacatgcattttgaaattgatagttgcacagactatgttttgtaaactggagtgttataatatgggagctcaatgtattcagttgaaattcctgacttagctacgtactgtttgtataaacttgaacatttacttaattttgttaagctgcaggtcctactgtaaaaatatgggtaaacatttaagtacctctcaggattttttgagaagtaagtaggtggcccacaataaataatttgcattgtttttggtcagcagtaggctttaaaaatcaaatactattattaaatagtaaaattatgtaaatctgtatgctaaatattaatttcatgcttcagttcattttattttgtaatatttggattttaatgtctcaactagtccccaaaggagtggaatgcaaaatttgaagtcttctttgagtaaatgaactgtataaatctcaatgtcaagtttgtttaaaaaattgaattgctgtgtgaccgacaaatgtcttgcaaatatcttttagtctttcattttcccattttcagtgttttcactccttcctctctcctctctggctccatttacacacattttaagaaataaaagcaatatattaaaaaatgaggctgtgtcctgcagggatgggtgctgctgagatcaggtaaaatgagtaaaagggatgccaagcactttgccagacacatgttggtcattcaccaactgacgcaaaactcaatgccaagtggttgaacgcttagccacagaacatactgagactctactgctgatcttcctgtggtaagacagaaagggaagcccaaagaagagagttacatgttccctccctgtgaaattcatcccttttcaataatccctcggggaactgcccagcccctcatctgtccagtttttggtcaggcatgaccttctttaacatttatagagatttactgtctcagatactattctaaatgcttaagtgtatgaaatcatttaacctttaccacaatcccatgcagaagatctaattactaccccattttacagatgaagaaaatgaggcacagagaggttaagtttcttgccctgcatcacagtgaagtggcagagcagagattcaaacctaggcattctgatgcaaggatttgtgctttcatcatcttaccatctctgcaaagccttcaccaattgcctcaagcatattttactgtaattcctccatactcacttggaatacatttgttttcataaatgtctagagcatcactgtccaatagaaataaaatgtgagtgatgtgagccacatacataattttgaatgttctagtagccacattttaaaaaattaaatggaacaggtgaaaataattttaaagctatactttattgaacccaattgtgatgtttagttttatgtaccaacctggctaccctattgtgtccagttgcttggttgaacaaaagcctagatggcacaataaaatatttttcagatgtgattaacaattaaatctgtatagtagattacactccatattgtgcatgggccacatccaatcagttgaaggccttaagagctaagactgtaacatagaggctggtgtggtggctcatgcctgtaatcccaacactttgagaggatgaggcaggaggatcacttatgcccagaagttcaagaccagtctgggcaacacagtgagaccctcccatctctaaaaaaaaatgttttaaattagccaggcatggtgtcatgtgccagttgtcccagctattcaggaggctgaggtggcaggatcacttgagcctggtaggttgaggctgtagtgagacatgattgtgccactgcactcagcctgggcaaaagagtgagatcctatttcaaaaaaaaaaaaaaaaaagactgtaacataaaaaatttacctgtattatctttgctaggactttgtattagtccattttcacactgctataaacaactgcctaagactgggttatttataaaggaaagaagtttaattgactcacagttccacctggctggggaggcctcaggaaacttacaatcatagcagaaggtgaaggggaagcaagcaccttcttcacaaggtagcagggaacaggtgtaggggactgccaaacacttttaaaccatcagatctagtgagaattcattcactatcatgaaaatagcatggggaaactgctctttgattcaatcacctccctcaacacagaggaattacaatttaagatgagatttgggtggggacacagaggaaatccatattattccaccactggcccctccaaaatctcatgtccttttcaatttcaaaaccaatcatgccttcccaacagtttcccaaagtcttaactcattccagcattaacccaaaagtccaagtccaaagtctcatctgagacaaggcaagtctcttccacacaggagcctgtaaaatcaaaagcaagttagttacttccaagatgcaatgggggtacagtcattcctgttccaaatgccaaaacaaaggagccataggccccatgcatgtccaaaactcagcagggcattcattcaatcttgaagcttcaaaataatttcctttgactccacgtctcacatccagggcatgctgatacaagaagtgggctcccagaaccttgggtagctccacccctgtggctctgcaggatacaacccccacagctgctttcacgggctggtgttgagtgcctgtggcttttccaggagcacggagcaagctgtcagtggatctacctttctggggtctggaggatggtggccctcttgttatagctccactaggcagtgccccagtgagaactctgtatgggggctccaaccccacatttcccctctacattgccctagtataagttctccatgagggctctgcctctgcagcaaacttctatctggacatccaggtgtttccacacatcctctgaaatctaggcagaggttcccaaagctcaacccttgtcttctgtgcacctgcaggcccaacaccacacggaagctgccaaggcttggggcttgcactctgaagccacagcctgagctgtaccttggccccttttaggcatggctggagctggagaagctggaatgccggtcaccatgtcccaagactacacagagcagcagggccctgggcctggcccatgcaatcatttttccctcctctcctctgggcctgtaatgggagaagctgctgtgaagatctctgacttgccctggagacattttccccattgtcctggctcttaacactcagcctcttgctacttatggaaaatcctgcagctggattgaatttctccccagaaagtgggtttttcttttctaccacatggataggctgcaaatttgccaagcttttatgatctgcttcccttttaagcataaattctgatttcagatcatctctacatgaacacatatgactgtacgcattcagaaaaagccagaataagcatcttcaatgctttgctgcttagaaatttcttctgccagacaccctaaattacctctctcaagttcaaagtcctacagaactctagggcagggataaaatgctgccagtctctttgctaaagcatagcaagagtgacctttattccagcttctaacaacttcctcatctccatctgagacctcctcagcctgaattttattgtccatatcactataattttggttaaaatcattcaacaagtatctaggaagtttcaacctttcccacatcttcctgtcttcttctgagccttccaaactcttccaacctctgcccgttacccaattccaaagtctcttctacattttcaagtatctttatagcagtgcctcaactcccagcaccaatttcctatattagtccattttcacactgctataaagaactacctgaaactgggaaatttatgaaggaaagaggcttaactgactcacagttctgcatggttagggaggtctcaggaaacttacaatcatggtggaaggcaaaagggaagcaagcaccttcttcacaaggcaactggagagagtggtggggggagctgccaaacacttttaaaccatcagatctagtgaggactcactcactaacatgagaatcgcatggggaaaactgccaccatgatccaatcacctcccaccgggtccctccctcaacatgtggggattacaattcaagatgagatttgaatgaagatacagagccaaaccatgtcaggctcccataacaaaacagcacagactgagtggtttaaacaagagaaatgtattttctcacagttttggaaactggaagttcaagatcaaggtattggcaggtttggtttctcctgtggcttttttttttttttttttttttggcttgcggacaaggccttttctctgttcaagaacatccctggtgtcctatcatattagccccccacccttacagtcccatttaatcttaattgcctctttaaaggctctgtctccaaatacaattccactgggggttagaacttcaacatatgaatgtggggaagagacacaattcagttcataacattgcctgagttaccagcctgactcatctgccctgtggatttctgactcaaaactgcaacatcaactcttaccttaatctccaggctgctgacacagtctacaaatatcagagttggcagcctccataattacatgagccaattccttaaaataaattcctttctcctctctctctctgtctctcattctttgtgtgtgtgtgtgtgtgtgtgtgtgtgtgtgtgtgtgtgtagtatatatgtaacaggatattatgtatatacagatgtatatacacctacatatatacacacatatattatgtgtatatacacatatgtatgtctatgtatacatatgtatatatacatatacatgtgtttacatatacataagtatatggcacatacatgtgtgtttacatatacagaacatgtgtgcatttacatatatgtataatacacatgtttttgtatatacataaatgtatatacatgtttgtatgtgtatatatcctattacatatataaattaaatcatttaattataatctattagctccacttctctggagagccctgatacaccagtatatcttaagtgttattattcctacatgtaatcaatataaaaattattaatgagatattttatgttttatgcatgctatgtttctgaaatcttgttagtattttgtgcttatagcacttatcagcttggactggccacatctcaagtgctggataatcacatgtggctagtggccatcatattgggcagtgaaggtctagagcagacaggcaaggtgaagcggaaagaagaacaaaaatgaagacagaccagggtttaaactccaccctgtgactgaagctcagtgaatgctagctataatttctatgctcctaactggagaaccttcctgagccttggttttctcatacataaatgagggataatagtacctcccttaaagagctgttataaagattcattggaaagcccctcacagagtgcttggtaaagtgtagatgctctattctcactcataggtgggaattgaacaatgagatcacatggacacaggaaggggaatatcacactctggggactgtggtggggtcgggggaggggggagggatagcattgggagatatacctaatgctagatgacacattagtgggtgcagcgcaccagcatggcacatgtatacatatgtaactaacctgcacaatgtgcacatgtaccctaaaacttagagtataataaaaaaaaaaaaaaaaaaaaaaaagtgtagatgctcaataaatatcaggcacttttcttttcctcttagtcttcatatctgttttcctaccttccctcttcaaggaaaaagtctgcttattttacctttgtttccccagcctggcccactggtaggtgctcagaaagtcgttgtagaattaatgagtggtcttaagttcctatagtggaatatatccaattgctaatttagattttcctttaataaatcatcctttaaaacactttggcaagacttgcaagttgtggagctgttgacattgtagctggtggtccagtggagagatggtccaaggtctagtttggggattggagggaagagcctgttaagggaaaggaaatgtggcagcatcacaaacaaaacaaaccagatgagatgaaccacaggcatctgtgtcataagattacaacaaaattttttaattcagttactgaagataaatttgaaaactgttaatgagatgtatccttatgaaaggaaaaaaataggaaacacattcaccctgggtcacaaaaatctagtttagatgaaaagaatttgccctgccagtgagtacattaaagatgtgattcatttgcaaaagtaaaaattcctggtaatatgacatattaagaaggcatctgatgtattagtctgggttgtctagagaaatagaaccaataggagatatggaaatatgatatattatatggaaatggctcacaagagtataaagctgacaaatcccaagatctgaagtcagcaagttggaaacctaggagagctaatggttccagtgctcaggctggcaggcttgagactcagggcaaaccaatgtttcagttagggtccaaaagcaggaaaaaaaaaatgtcccctctcaaaggcactcaggcagaaagagcttcctttaactcatgggaagatgagcctttgtccgcttcaggtcttcaacgaaccaaaccatgtgggcccacccacatcatggagggcaatctgctttattcagtctatcagtttaaatattaatctcatgcatccaaaaacaccctcactgatatacccagaataatgtttgatcaaatgcctgggcaccccatggcccagttaagttgacgtctaaaattaaccattacacctgatatatactcatgacagatttctttcagagcttcccatgtcagtaaaatgtgcttgcaacaaataggtctcctttttctccctactttgcttcttctcaagtgcattattttctttccctcatcctcatacaagctattggagaaacactttggaatgggaactaacatctacagcacaccaccaccccatgccatgcttattaccaggtactcatcacactgtgtccccgccagaagctagagaacaggagaagtcatccaagtggcaacaaccttgggaagccattgcagccctaactctcttgctcagccttgtcatttcaaaaactcaatctcgtcagggtgtcaaattcggtcaaacttgggcattataattcacagaaactcgattcaagatacttctgtacaaacaaacaaaaagccatctaattaattacaacaagaaatacaactgccaagggggatctctagctaaagcatcccttccttgtaaaattatatcagaagtcaaattagaattgaaatattaggttagggcaaaagtaattgcaagtaattgcattttttgcctttcaaagtaatggcaaaaactgccattacttttgtaccaacctaatgttgattacttgaattgaatctagagtaagtggaaggttgatttaaacaagatgctcaattacaccaagcgaagaatggctgatgctacaatttcaacaatcatcagacaggaaaaaacttggaacccaattttgctagatttttctgccataatgtacctcatagattctttgttttattttttcatatgccaggtgaaccaactccctatctgtgtaacacattatttgtttcaaaaatatttaacaagttacaagtcaagtcttactggcccataaactattttatctcattaagatgacccatcttgctgcactcaatttccataagctttcaaagaaaatctcactgtttgactttcttttcattcatatccatttaattcttataacaattctgttctggtaatcaattgctgattaataagtgatcgcaaaatgtcattactcaaaataataagcatttttattaatatcattattattctcagcatattctcaacatcattttcagatcaggttactgatataactgacattggaatattataacatttttaagtgatgttttgaagtcctcttgaccattcttggaagaaataacttttctattctctactaaacattcttcacatttcatattggctactgcagatatgcagacattctttttattcctcatacacctcttctgttcttagaaatgcagggagtaactgcttcattggtctgttggactattccatcttaaaatgttaatgaatgttaaaacaggtgatatcctctcttagacaaaccattcttcaatgccttaacctaaaggagttggtatatttgaaatataatcatcaaagcaaggttggtagagaaaaaagttggtctgggaagaggagatttgaaggtgaagagttaatttattcatttaaaaaacacatattgccaggcatggtggctcacccctgtaatctctgcactttggaggatgaggcagggtggaatgcttgagctcaggagttcgagaccaagtttgagcaacatagccagactctgtctctacaaaaaaaaaaaaaaagaaaaagaaagaaggaaagaaagaaagaaagaaagaaagaaagaaagaaagaaagaaagaaagaaagaaagaaagaaagaaagaaagaaagagaaagaaagaaagaaaagaaaagaaaaatcagcccggcatggtggcacatgcctatacaactcagaaggctgagtggggaggatcatctgaacccagggaggttgaggcagcagtgagctatgattgtgtcactgcactccaacctgagtaacagtagtgacaccctcaaaacataaatacataaaataaaatttaaaaacacatattgacccacaaaacgtaattatttgttaagaatggccatttggtgacaagcagcccaaggaggcaaatttactcttaataagttttttttaacttgtttttgagacaaggccttgctatatgccacccagaccatagtgcagtggtgcaatcacagctcactgcagcctccacctcctgggcccaagcaatcctctcacctctcagcctcccaagtacctgagactacaggcgtgcaccatcacacccagctaatttttgtattttttgcagggatggggtttcgccatgttacccaagcttgtctcgaactcctgggctcaagggatctgcccacctcagcctcccaaagtgctgggattacagtgtgaaccaccttacctggcctaagctaacaatttttaaaatcacattaatgtttataaaggtgttataatccctggcaaagttcccatgctacaagtccagcttaataaaaaatgagacgccatttaggcatctagccttaaacctcatacctcatgatactaatactttaagcctctcataaggggaactcatacaagtcttaatacttcacagttactagaatgctgagacctcagatgaaatttttttcttgtggctttctacagaaaaccatgaagtacaaaaatttgcttttaagctactgtactcatttattcaacaaatatttgtcaggcgttgctatgtgccaggaactgaggtgcagggaacacagccagagcaagcgtgacccctgccctaagaaaatttgcagtttgaataaatgttctcagacctgcagtcattctgggactttccacaccttccttcctttcttttcttctttctttctttctttagtgttaccatcaaattgctactacagtgtgatacttaagagaacaaattctagaattaaaatgctagggttcataacctagttccaccaagaaaaacaattttttaaagagtcataaataataaataaataaataaataaatgccagaagaaatcaatacttgataattgaataattataagtataataattattacttcatcaatgctcttatgtgaagcaaaactctgacagtagacactctaaagttccagagaaactctcaaagagcattttttttgttttgatcccaactacattgcttttccttaagaaatggtttttacagtattctcagaccacaatccttcaatattttaaaaatcattccattaaactctgcttttccatctcccttgtgaactcttggccagtgagacacagtttcattttcactttttcaaaatgatagtatgaaaaaacagaagtgaaagtatgaatcataatataatcaggagttcatactgagatacccatttataactcagaaaaccacggggtatttccaaactgatgtcattcatagaaagaataccatgtgttgtggaagaataagaaaaattacctaaaccaactgggggatttagaatacatgtgggatattcccagctaattattttcattaaaaaatttttttacaaagatcaactgtgtttcaaatacttacagtgatagtcatcttggaaattacaaactggattctgggttatactttttaattatgatcagtgagacaatggacattgagattttgctttagagcacataatgccattataactgtatataactcaaagttatttatataactcaaggttttatatatataactaaagttttattttccttaaagagttatataaataccaaaatagccatgaaatcccatgtagttgttttacttataaggaagaatttttataggaaaaactgtgagccctgctcaaattattaaaattgggccggacacagtggctcatgctataatcccaacactttgggtggtcgaggcaggcaaatcacttcaggccaggaattcgagaccagcctggccagcatggtgaaaccccatctctactaaaaacacaaaaattacccagacttgttggcttgcgcctgtaatcccagctctgagatcacgccactgcactttagcctgggtgacagggtgagactatgtctcaaaaaaaaattattaaaatttattacttttattgtattatgttttgggggggaaatacatatgaatctcatttttccaaccaaacaattaaaaatgatttttccctctctctactacatcccactacattaaaattttttaagaacttaaaaatgttacggtgtacatggcataaattaatgatcttacagggatgaaacctttcccaggaaatattctcctttaggttgtgtacactggcttggaaaacactttggctgtgttagttctgccatagttgctcctatggtggcagctttgtcagttgttttgacagatcctaatatccagttgtaaggacaggccagctatatctcttttcaatctgaatgcccctgttgcctaatcagccaacatccctgacatggaaaagtcatgccactcactaatcttggtaataccctggcctgttctttggtttctgagacctatccaagagtccagtgatagacccacaatctcctgtcctaacacctgttatgaactgctttgttatcctgaatctttcagcgaggacacaggtgaatctgctagtaggatggtctggccccatgtaatttagaagtagattttaaaatgtatcagaaaatcaagtttctcttcattctatataccaacaggaagtccacatggattaaagactaaaagcaaaccttaaaaattttaggagaaaatgtaggaggctctctcataatactaaagttaaaaaagatttatcaaaatataaaaaggtttatcagttgtaacaaatgtaccattctggtgcaggatattgaaaatgaaggaaattatgcctatgcaggggtggaggtaggtataagggaaatctatgtatcgtctgctctattttactatgagcctaaaactgctcttaaaaaattgagtctattgaaataaagaaataacagagcaaaccattaagtacaaaataaaaaagaataaatttaatgacattaccattttaaatttctatatattcaacactataaaccaagttaaaaggcaagcaagtgacagaagatatttacaagacatttgaaaaatatttgcaatctagaatattttaaaaatcctataaatgaggaaactgcaaaaagtgcagtagatagagaaatataaaccttcagttcacagaagagaagctctatatggccaacaaagatatgtggaaaaaagctgtcacttgctggtaatagaaacatgcaaattaagacaagatactctttcatgtccatcagactggaaaattttcaaaaggctgacaatgacaagtaatggtaaggaagtaggggagagggataggaaacttacaaattcttaatgactggtaattaatgaacattgacatttcactaaggcagtgtagcatacatttgagaagaaaaatataagaggttgaaagagtacactggtatgatttagaaaacatttttgcactatctagtaaacttggaaattcaggactcagcaagtcaacttctaaagcataaaatccagaaacacttttgcacagggacacaagaatgctccctgcagcacccttttttttttattttaaattccaaaatgtctgccattgggagaatggctcctcttagtttcatctgcctcaacactaagcatccactttctctttaggctctttccatccctttcttcatgtagttggaagcagggcactgaccctatccactcactcccactgacattcctctctcctcctccctacgctcccctattcccacagggatctctttctaccttggaaaattcaccttccatcctgcctctagccaagacatgtcatctaggcccacaaatcctccttaatgtttcctgctctggaaatgttgcctgacttcttcagatttaaggaactgaaaattaacagccagaacattacctgtcttacaattcccagggccagttaccttcctgaatgaggaggaacaggcagagaaaaatatgtatagagagaataaaaagcatagattaataacttcaaatattatcttaccatattcttctcctagcaaatctttggacagtgacacccccacacgcaaactggtgcttgtttctgtggggagaggaagaaagggaagcctggacatctggtgaatttcttggctcacctgaaagtttctgcttatacctggagtatatgcaccctctttcaacaatatccctttactgctcttatcctccccaccttgggaacttggcacaagtatgggcagaacttcccccgaacataattagggagagaggtgtcctgccaatataaaagacaactgtacaggggagggccctgtcaataactgcaggtgacttgggttccagccatgttttcttcctcctcagtcaccatcctcctctgaatctctgtgctcaaaaagtcagagacagccactcgtttccatttaggagagtggagtgaatatggctgtcatattggtgtccagcccttctctcacccaccatccatcaacaggatggtgttcctcttcttttcttctctgcccctttccacttctgatataataagtgaatatacaaatgaaggaaaagtcaaaaatcctcccatacctcccttagtttacatatgtgaagaactgggtatgtaattgaccccattttctctttggccagcacataagctgtttttaggtgttttttgtttgtttatttgttttttgttttgagatggagtctcactctgtctcccaagctggaatgcagtggcacgatctctgctcactgcaacctctgcctcccgagtagctgggactacaggcatgcaccaccacacccagttaattttcgtatttttagtagagatgagttttcaccatgttagccagggtgttctcaaactcctgacctcaagtgatccgcttgcttcggcctcccaaagtgctgggattacaggtgtgagccaccgtgcccggccccatgtttttagattttgatttttttaatttattggtattattcgtttcactctgattttgcttttctaaatctcactgtgtattgtgaacatccctcccatttgggacatttatatgtcccaatacaactaaatatgattctctttaagagctgccccattttccattgcgtgtgtgtgtgcaagaacatgcacaagtgccatgatttaatcagttacccattgatggacattcagacagcttatgatttattgttactacaatgatacaaatggtattatgtctatacacgttctatatcaagtgtgattttaatatgtaagaattcaataatttgaattcctgtgtaacatatagatgttttaattcaaatagttgctgctagatttattttccaaaacaaatggaggaattcacgtgtctctcataaaagtgagggaatgcttatatccttgacaatttgccagcattggttgttattgctggtttgaacatttgccagtcagacaagttaaaaaaaaatatattgtaattccaattcagtatgagaatagagtaagggtaatgatgtcagtcccaaacaaagcaaacagtgcccaagagcctgaaatatttggttgtacactggtatctctttctctgcttgaccctggctcaaaacctacattcctccatacagaggtctgagaaagttggaaatatcctgtgttttccttagtagtgttttctttcagttcaacaggattatgtcaactgttattacaaggaaaggccatcgacacaccagtgtaaaaaggaaaaggtgggtccactgactaaaattaataaaagggcaaacacacacagaaacagctttaaaacctaacagtcacaataataccaaggaaactggcaggacagggctagcctcaatgcttatatactcagggtatctcctgaacttttaccacctaagttaagaaattaaccacaagatagccttgcaaaggtctaacaggggtattgatatcagagtgggttttaaaagtgtattaactataatcttacttttagcctatttgattctacttatttcagaactattaatgacgtttgtggagatatatatatatatatatatacatatatatacaatctggactatcggactataagcttaaaatcagaagactcttttatatatttttataatgcctcaaatctagcatagtatcaggtacagagtatatgccccgagtctagcaaagtgtcagtacagttctgtaaatgttgattgcagaaactgaaagaccatcagcatgataaaccactggaaatactgacacagatctgttgacagatcagtgcaatggactgtattgtgttccaattcatacgttgaattcatatgttgaagcccaaagttcatatgttgaagccctaacgccttatgtgactatctggagatagggtctttaggaggtaattaaggttaaataaggtcataagggtggggccctaatctgatagtacagtggcttatatgaagaggaagagagagagagacctctctccttctctccaggcacgtgcacctgaagagaggcgatgtgagcacacaaagagaaggcagccatctgcaagtgaggaagcaggctttcaccaggaacccaactggctggcatcttgatcttggacttctcagcctccaaactgtgagaaagtaaatttctcttgttcaagtcaaccagtctatggtactttgttatgaatgcccaatcagactaaaacaatcagaaaccccatgacaagtctaatgcttttgattggtttaatgacaatgaatgaaaaaaagaataattacttttttcaaatcattctgtaatatagtcatcatccaagaatgaattatagcacaatacatggcatgtatgaatttaagaataaggactaacccaaaggcttgagaatagaatgtaacaaagtagggaagtgagaaaaaaatattaaaatgtgccataagtcacattcaacaacaaaaaaaaatattttgttctatgtggaaacttttactcagcctacatattatttgactctaagtttgattagctgtgataaagttcgagaaacattttagccccattttcctagagttcatcaaagattgctaaaaaatcacataagtgttgcttttaagctgtagccccaatatgtttttctaaactggaatacggaaactcatctagtgtttcttatgaagcacaggatcccaccaagaaaaagaaatgtcatttatttctcatatttgtctcatattacattttttatagaaagttggttagaaatttgcaacccaaaattagcaagaaaagtctatgacaacctcaccctcactatatattccttgaataaaggttgcctttatagaggaattaactgaaaaatttgaaacatgctttacatatttaccattatgatgcctaaaataaacataccagtgtagattcagaaatctagatcaaagacaccttttcacattttactcattttttaagtagtaaatagaaggatgttctaagcaattagcccagagatgcttgacattttcacagcaatccaatcaacttaacagggacatatttgcaatggcttggttcttctgaaggtaacaactttttctcttcttttctctttttcttttttttttctgttcaaaattcagaattacttctctcacttgctaaagtgatacccttaatttctagggcattctgacatatttgtcagcaccatctctccaacaaccttaaaaattgtcacagggataaatgaatttttgaaagctaaaactcaaaactttattctgtcatcctttatatacttttttattgatgatcatgagccttattaattggattcgtcacctttccctgtggccaaaactttgaaagtagaattttgagttttattctttactatatcattttactctaaaatatgttcaaatagatttttccacactgtgtagtactgtactgtgtaaagaacgtttgtaactaggtcaacatacactgtttctaggcaccactaaggaaataactgtgttatacccataatagaaaattaccagagtaacaggattaaaatgactcattaggcctttgattggggtgctctgtgctacaggtagtgccaaatcgagggctctgaagactcatgttgtgaaagtttccttgagaggtcagaagtcactctttcaaaatacaaagactctttcaaaaaacagatgagtgagtgcattggatcttgagaaaatggaatatggcccttctttctctctgagaatgaacatgcagtttgagtagtctgaatcttggaggaaacagaagaagctggtctacacaacacctttctctgcattatctagaaaggtaaagaataaccaaccacagccctgcagggtgacagccaccagagtgagactgacaggaggatatttggaagaagcacctgaatccgaaaaggaagaatccatacatcttccatccctgtgcctgaaaaaagcgactttcagaaagatcaagaatttggtagcctagaaaagagggatctctgctttatatacaaattctgatacagtgtcctacatgaatgttttattcattcattcagtacttcttattgctgtctgtgaactagatactagaaaaggataaaatactaaacaatcatttatgactcctgtcctcatacagctcatatctaactaggacatgtaaatttgggcaccattctgtatgtctttccttatctacacaaaatttgtcaatgcgccctactttctctatcttcaaaatagatccagaatttggctgtttatcacaaaacatcaacttggtacacaacacaataatttttgcctgtattattgcaactacctcctacctgacctactgttttataataagtttgtccagcttcagcatattctccaaagaacagacatagagattccatgaaaacataatctcactcctctattcacaacctttcaatggctttccatctcactcagaataaaaactaagagtccttaccatggtataccaggacctacatgagctggccccattacttctctgactacatctcctcctccctcctcccttattcatttcaccttaactaaactgggctcatcacttgtcactgttctttgaacagagcaggcaagctccttgctcagagtattgcacttcatacaccctctgcctgtaatgtcctttcctctgctatccaaatgatctcagggagcaatggagtgaacatgtaaaagcttaaaatttgcatttctttttaaatgtttttcaactcaaactgttcattatttggtactgacctcatgcccaatttggttatattagcaaaattctttattatatgaatgctatacaactgctttaatcctggcttaaagtctttttctccacctagagggcatatattctgactctaattctaactatcaacactgtatacttaataaatattcacttttgtcagaccttaattttaacataaatcataattaatacagcctcactggtggcatcaattaaatccacaaatgccaaagttgaacaaattttctttaaaattctatcaattctagatgcaattttgcacacatatttgtctccaatacctcacaaaaccctactgattaaaaaaaggatacaagtataaaatagaacagtcatataaaaaagataacgtggcagagaaatggaggtgtgtgtgcatattttaccaacaaataagaaatgtcaacatatttctgcaagatcaaaaataaatggaaatgggttgataaaacaagcaggaaaagttactgcagtaaactgctaagtatctgcaaagctaaaagccaatcatatagatgaaacatcttgtatcgtgattttctagggcagtctttaacttattttcctagaataattaatagaagcccccacttttctcaaaatatgcctgtttagaagacaattaaatgaccattatccctatggaaattcagttttagtttcataagaagcaagaaaaatgtacactgattacagcacaggtgttctagaaagaatactaacccacctggcaaacttcatcagcttcttccaccccattcagagtcacgtgcttttgtctcctgggtaaaaataaaacaaaagccttttctttataaactgaatgtctaggtaagtgaatgttttgaaggtgaatattgatgcccacagtaaatctctcctcatctggaattttgagacccacagtctagcagcctactccttttcatcctgaagtgaagaatgccacttcccactcaactctatcacacacagagagagcttgccatcacatcaccactgcaccaggaagcgggagctgcactagcaagccagtcctcttctcttaaatatgagtggccaaccaatgatcaccaggcacataaagtacaccagctgcctgaggagaaagatcaaaataccaaacaaaatgactggtcgcacaggaaactccactaattagacagtatttttattattttacacagatagtttttgtttgggtttgcctacatgttctttctaagctacccagtatagggtattttgttagagcagctcaaacaaagacaggcagtaatgtggtttagctatgtccccacccgaaatatcatcttgaattgccatccaacttgtaatccccatgggttgtgagagggacctcgtgggaggtgattagatcatggaggcggttcccccgtgctgttctcgtgatagtgagtgagttctcatgagatctgatggttttataaggagcttttcccccattcactctgcatgtctctctcctgccaccatgtgaagaaggatgtgtttgcttccccttctgccatgattttaagtttcctgaggcctacccagacatgctaaactgtgagtcaactaaacctctttcctttataaattacccaatctcaggtatttcttcatagcagcacgagaacaaactaatacaggaagctaatactgatatttcagatttactacagaaaaacacacttgtcatgtattggtagaactcagtgtattaagtacttactttgtgtatattggatgttaacttttaagacgattatatattagaatttaacttttcattgttatcattcattggttcattcaacaatattcagtagttgtccattatatacaaagccatggcataggcacacaatgtaaccttaaaaaatgtatagattaccctgaaatgttccaggaggaattttaaaagggtgcaaccagtttaaaaaatagtttggcagttcttgaaaaggttaatcatataagttactataggacccaataattctactcccaggaatatgtcaagagaaacaaacccatatgtatattcaaaaatttttatgtttatgccagcattattcataatagcaaaaaagtggaaaaatttcaaatgtccatcaactgatgaatggataaataaaatgtggtgtattcacacaatggatacttacttggtgacagaaagaagtgaagtactaatacctgctacaacatggatgaaccttgaaaatattttgctaagttaaacaacatattgtatgattctattcacatgaaatatccagaacaggtaaaatatagacacagaaaatagattagtatgtgccagggctgagtcaaggagtccattcccttaccttcaagtttcccttgagatcagcacaagaatgaaattaagaaattctgtgttgtgagatcattaatgcaagatgtcaatgaatcataatgttgattgtgtaagtcaggcaagattttaatgccccaaaagttattttccatccattaaataaaaggaaagcactagtattctttttgctttgttaaattattatccttttgttcttgtatttgtactatatgaaagttcaataagttagtagaataaaatacattcctcaaaaaaaaaataggtgtggaattttaggtcaaaagtcaagtacattatcctgacttctgaaatgtatcaccaattactcccccaaaactttggaccaatttatatgcccaccaggggctcatgaatgctttcatttttctgaaggcttacctactgtagatattatttttgcttatctaaaccaagattttaaaaaccagattctttaaacagaggttgtaatgacagagaaagtaaataacaacaaattataatgacaaatcatctgagctactttagagtatatataccttcattcaaatccaactctcactatacgtggttaaatcaagccaggatctgattatatttatgattttgtcagattgtagcatttagaaaaatggttagcttgttcttttgaaatatcatggtgaataccatgaagcaatgaattttgctaccacaacttctttttacatatttcccaatgtgacaggtaaaatattagagtataataatttctcattgtcctgccttctgagttaggaataaatgtttttaaacattgttcagccaattgggtcttttgatgtaaagtatgacgtatttatgacctattgctaccttataataaccacaaacttggctactttaaccaatcaaatttattatctcacagttctgtagctcagaagtctggtgagctcagctgttttctctggcctgggttttataggctgaaatcaagttgttggcaagctggactagtattcagaggttctgagggagaatcttcttccaagcgcattcaggttggctgtcagaatccaggtatttgggcttcagaggtgaagtctttgcttccttgtaggctgtgaaccaagagcctctctcagagatataaggtggcctgaattcctccatctccagataagctagtgtgctttgagtcattattacacttggaatctccttcacttctccttctactgcacctcttctgcctgcagctagagaaagttatctgcttttaagggattacatgattagagtgtgtccatcttacatcaagtatttttcatcagattaaaaatacggagatcaataagatagtaatcctgcccccaaggaactcacacacagtttaatggagatattactttttaaaattatactttagattctgggatacatgtgcagagcgtgcatgtttgttacataggtatagctgtgtcatggtggtttgccgcacccatcaacccatcatctacattaggtatttcttctaatgctatccgtcccctagcaccccaccccaagacaggccccagtgtgtgatgttcccctccctgtgtacatgtgttctcattgttcaactcccacttatgagtgagaacatgtggtgtttggttttctgttcctgtgttagtttgctgagaatgatggtttccagtttcatccatgtccctccaaaggagacgaactcatccttttttatgactgcatagtattccatggtctacatctattttttaaggaaataattctagtagtgttctttgacccagtaactctatgttaacatactaaggaaatgttagatgtagcttatataaaaataaatattaaaatgtaaaaaataggctataaaaattgtcattatagcagagtatacaacagcaaaattgctaacaacctaaatgttcagcaaaagtgataaggtacacccacataatgaagtgctgtaaagtcaattaaaagtatgttgtagataggtactgattaacatgtaaaaggtttttttttttccacatcgtatgggtaatgtgtcaacgtttgagtgaagtacatctcacacatgaatgggaagacccaagcatcacacttatgaactacaaaaggatcaacatataaaagtaaaacaaatcaacaacaaaataatattacagtgaagcgtctgaaagcacatgctccaaaatgtaggtttttttctgtcagtctgcatcctttgacatttccattatgatcataagcttagtaataataaactaacaaaaatgttatttttaacaagtgaagcttatatttctgtgcttttatataaatttccagaaagttgtttatcgaattagaacaaaaatgattgtttatattttaggaaaaatgataaaatagctttttattgggagcaaaaaattaagacaaaaaatattctccttgtcctcagatgtttatatctcttgtattaaaaaaatcatcagttttattacttaccaaaaacataactaatatcccctcccaccattatatcataattttgtttaaattatgcaccaaatttcattagtcagactcattcatttgaaaatgttgcacagttccacctcttcctttaccactacagaaactttatctgaaggttttatgtccaaacattggctagagaaacaaacatgattctatgggctctgaacatatcaaagattacaaaacaatttgacttcaagggagaaagaaagtgaaaacttagcttttggagataagtatctatctgagacaaatctgaaatgtacattttatcagatttttctcaatttcaattttcattgcttgtattgactggcataggatgatgtttttcatgaaaaatcaaaggaggtcttagtgatccaaaggattgcagcatttgaaatatgttgtggatttacttgttgctaagtccttaattgctcctcaagcgtaaggagtaaaaaaaagttgggacaccaccttcatgatctcatctaaacctaattgcctcccaaagtctccacctcctaatagcatcccattgggggttagtgcttcaacatatgaattgaggatgcagtccataatacctagttggtaagattgcttgagaattaaattgagttctgcatataacccacagcctgatataataagggcccacactggatagcaatgattactggtaggggaagttagtgggtgagggtatgtcaagaaaacagtatgagctgtatgagcagaggtgggaatggatcatttgtgttcaggcaatggcaagcaggtaagaccagctgggatgtaatattcatgttagacagaggaaggaaatatcagaagatctgaaagtgcattgggaagaaccctggatttctttggatacctttttcttcctaattgtctaatgtttctggcaaatattggcctctactttctctcaaaatgcccattacttccagaagagcaacaggagtattcaaacaactagccagcaatcataaaagtggaaattactttagctgctcattcagagcatgtcctaaagataattgaactaaggaaagctgaatattcccaaggcagatgtgcagtggaaaccctagccccaagaactctattactgtctcaagaggatgtgcacaatgaggctatgcagagaacaacattacagagaggaacttaagcttccttttcattaatttcggaatgcgagctgcctatcattatgctttgaaattggccctgatggatttgcggttcgtgttggaaacatctttattttagtagatagatctattctttcaactctttttgctttgtgttattacgattaaatatgatagaatgatgcagtaaacaaagcaggtaagcttcaagtagctgaggtacaagaaaatagggtacatttacaatcaggaaattgataacattcgttggttcaactggcaggatagtggtgttctagatccttgctgctactcaaagtgggttcagaaaccagcagcaagagtatcacatgagaattgttagaaatgcagtgtctcagacatcattccacacctactgaatcagaatttgtattttaacaaggtcccctggtaatttgtatgtacactaatgattgagaggtactattagttaataattgagaggcactcacaattgtgttgttgctttagaaaggccctcccaacgcttccctgccctcccaactcccgtcagttagaaatgaaattcagctgctagtcacacatttggggttttatttttctgatgtatgaaaagtcagtagttagtgcagagctgaaagagaagccccataatgtcatcagaaactcaagttcatgccatctttatgatcagtgatcctaatatatgtttgtcacctaaggtcacaagaagaaagctccaaatcttgtctgagttccaaacaaaatgaaagaagtgtaaaatcaaagtgcctgatacagtttggctctgggtacccacccatatctcatcttgaattatgatccacatttgttgacagaggaacctggtgggaggtgattggatcatgggggaagtctcccccccatattgttcacgtgatagtgagggaattctcacgagagctgatgctttaaaagtgtttggcatttccctcctcaccctctctgtctcctgtcaccttgtgaagaaggtgctttcttccccttcaccttctgccatgattgtaagtttcctgaagcctccccagccacgaagaactatacatcagttaaacctcttttgtttataaattacccagtctcaggtagtacctttatagcagtgtaaaaatgaactaatacacagaattggggcagtgctatgaagacacttgaacatggggaagtaactttggaaccagtaatgggcagaggttggaatagtttggagggctcagaagaaaacagaaaaatgtgggaaagtttggaattctctagtggcttcttgaacggttttgaccaaaatgctgatagtaatatggacaaggaaatccaggttgaggtggtctcaaatggagatgaggaattcattgggaactggagcaaaggtccctcttgctatgctttagtgaagagactggcagcattttgcccctgccctagagatctgtgaaaatttgaacttgagagagatgatttaaagtatctggcagaagaactttcaagcagcaaagcattcaagaggtcaattctggcttattctgaaagcattcagttatatatgttcacaaagacatggtttgaaattgaaacttatgtttaaaagggaagcagagcataaaggtttagaaaatttgcagcctgttcatgtggtgaaaaagaaaaccccattttctgaggaggaattcaagccaacgagctgaatattaacagccaagacaatggggaaaatgtctctagggcatgtcagagaccttcaagacagcccctcccatcacaggcccagaggcctaggagagcacaatggcttcttgggccagcccagggccctactgctctttgcagcctccagacatggtgccctgcaaggcagctgctcaagctccagccatggctaaaaggggccaaagtacagcttcagctgttgcttcagaggatgcaagccccaagccttggcagcttccaagtggtgttggacctgtgggtgcatagaagacaagaatcgagcttagggaacctctgcctagatttcagaggatgtatgaaaacccctaaatgtccaggcagaagtctgttgcaggggcaaagccctcatagagaatttcttctatggcaatgcagaggggaaatgtggggttggagcccaaacacagaatcccctcttgggcacttcctagtggagctgtgaaaagagggccaccatcctacagaccccagaagggtagatctactgacagcttgcaccatgcacctggaaaagccacaggcactcaatgtcatcctgtgaaagcagccatggtggctataccctgcagacccacagggacggagctgcccaatgctgtcggagcccactttttacatcagtgtgacctacatgtgagacatgtagtcaaaggagatcattccagagctttaagatataatgactgccctgttgggtttcgtacttacatggagcctatgcccctttgttttggccaatttctcccatttggaatggaaacatttacccaatgcctgcaaccccattgtatctaggaagtaattaacttgcttttgattttaaaggcttataggtggaagtgacttgccttgtctcagatgagacgttggactggacttttgggttaatactgaaataagactttgggagactgttgggaaggcaggattgtgttttgaaatgtgaaaaggacatgagatttgggaatggccagagtagaatgatatggtttggctctgtgtccccaaccaaatctgatctcaaactgtaatccccatgtgttgaggcagggacctggtatgaggtgattggattatgggggcagtgccccccatgctgttctcatgatagtgagtgagcattcatgagatctgatagttttataaggggctcttcacccttcgctctttgtctctcttctgctgccttgtgaagaaggcccttgctttcccttcaccctctgccataattgcaagtttcctgagccatgtggaactgtgagtcaattaagtctcctttgtaaattacccattctcaggtagtatctttatagcagtgtaaaaatggactaatgcacccacaattactagagatcctataatcgaccccttatctcatgatgatcatcatgaccgttttccctgactgagctctgacaaatataatcccaacagtgaggtctttccaagcccattgtaaaactgaatcaactcaaatacaagttagataaacatacaaaaatgtttatgcattcaagtatttaaaaaagtgggtactgaatatttagttctcatataatttcagtgagacgaactatcccttgatatttatatacagtaattttcattgtttggttgtacaccatatattttgatcttccactggtctctctccactcaaatatatcttccccacaatggccagagtaactttataaaacagagatttaataatgtctgttcattggttaaaatccactggtgactgactgtacactgcctgctggatagaattcaacttattacaccacaaacaaacgtctttcctgaaagtcccaatatttctttagaacaacaactctcatggctgtccccccaagtactctaatctcctttaacaccaagctcattcctctttttcacacatcttaccttttcccacgaccatgcctttgcatataatataacataccatctgtctagtccttcctcccttccctgactggtgaactcttactaatccttcaaggtccaacccaaatactaactcctcagcaaagtcttttcagccctgctgggttaacaggtgtctccagtgtatgtgtgtgacattgtttcaaaatttattttgcataagtatctacggacttcactctgttttgagaagtagtaccaccggctagcaccgtagctgacacatcacaggaatacattaaaagctgacttaattaactaatctgctcagacattcttagaaaatgttcctcttcctcagcagtgttagttttgctcttttcaggtcattcagacacataatggaagctgggttcaaatatacatgtgaggtttcaaatactacatgatacaatttagatcagtgtccccacccaaatctcatgttgaaatgtaatccccaatgctggaagtggggcctggtgggaggtgattggatcatggggatggtttctcatggtttaacaccacccccacttggtgctgttgtcatcatagtgagttctcatgaaatctggttgtttaaaagtttgtagcacctcccacctctctctcttccttctactctagccatgtgaagtaccagctctcccttcaccttctgccatgattatacatttcccaaggcctccctagaaaccgagcagatgccagcatcatgctgcctatacagcctgtgggatcaggggcaaattaaacatcttatctttcttttataaattatccagtctcaggtatttcttcttttttttttgacggagtctcactctgtcacccaggctggagtgcagtggcatgatctcagctcactgtaacctccgcctcttgggttcaagtgattctcgtgcctcagcctcctgagcagctgggattataggtgcacgtcaccacacctggctaatttttgtatttttagtagagacggggtttcgccatgttagccaagctgttctcaaactcctgacctcaggttatctgcttgccttggcctcccaaagttctgggactataggcatcagccaccatgcccagcctcaggcatttctttatagcagtgtgagaatggactaaaccagtgcagtaaattttttttttaatttgtgaaagtgaaaatatatgctgtgtgaccataaaagaggggtgttcaaaaaaactgatcatgttgactttgagtagatttaatccatcatttaaaacttttccccaaagcgagctggtcacagtggctcatgcctgtaatcctggaaccttgggaggtggaggcaggaggatcacttgagcccaggagttcaagaaaagcctgggcaggataaggaaaccccatctctacaaaattttaaaaattagcctcgtgtagtggcatgtgcatgtagtctcagctacttggcaggctgaggtgggaggaatgcttgagcatgggaggtcaaggctgcaatgatcatgccactgcactccagcctgggcaacagagtgagaccctgtctcaacaacaacaatgacaaaaatctatcccacaaagaaaactccagacccaagagaactcttatcaacattaaagaaagaaatgatatcaaacccacacactcagagattaggaaaagaagggacacttctcaactcattttatgaagctaacataatgatgatacatgcaagaaaagtaaagatcaatatacctcatgaatgtagatacagaaatcttaaaaaaagaatagcaagtagagtcaaataatatataaaaaagataatacagcaagagaaagtggaatttatctcagcaacacaagattgttttaacatttgaacactgatcaatataaattaacatattgacagaataaggtgggagggaaatgaatatatcaaaggacgcagaaaaggcatttgacaaaaagtgacacttggtcatgataaaaactgacagcaaaaaaaaaaaagaaaaggaattaaatgaaaaattcctaatcaggtaaataaaagtcccttaatctgataatctgataaaaccacatctacacattacctacattactattatattaatggtgaaatattgaatgctttcctagtgagatacgatatggtagggaaacataacaaagatgtctacttattaccacctccatttaatacttaaattcgaatacatgcaataaagcaagggtgggaaagtgtataaagattagaatgaaagaagtaaaatggtcattatttgcagatgacatggttgtatacacagaaaattttttaaactattacaaaccattagaattattaagtaaacttaatagctacaagaataatatatgaaaatcaatcatgtttctcctatattaacaacaattagaaaataaaattatttaaaattcacaatggcaccataaataaaatgcttaggaatagaaataaacctaagaaaagttaaacaaaacctctaaaataaaaattatgaaacattgcttgacaacatttaacttcatgttctaaaaaaaaagctaaaaaatttttaaattgtatttgtaattgacagataattatattaatagggtaaaatgggatgttataataaatatatacattatggaatgattaaatcaggctaattagcatagccatcgcctcatatatttattatttctttgtaatgagaacatgtaaaatcgactttttaggcaattttgaaatatacaatgcattattattaactgtggtccccagaccatgcaatagatcactagaacttattaatcctgcctgattgaaactttgcaccctttgattaacatctcccctttccccatccatccagccctccaggctttgtaaccactattctactctctatttcccagttcaacttttttagattccacttataagtgagatcatgcagtatttttctttctgtgcctggcttattcaattagcataatgtcctccaggttcaaccacatcatcacaagtgacggagtttccttcatttttaagactgaataataatcctttgtgtatatataccacattttatttatccatttatccactgatgggcacttaggttgttttcatatcttggctattgtgaataatgctgcaattaacatggggatgcaaatatttccttgacatattgtttttaattcctttggatatatatccagcagtggaattgctgaatcatatggtaattctgtttttagttttttgaggagcctccatactgtttttcataatggctgtactaatctgcattctcgctaacagtgtacacaggttcttttttctccacatcctctccagaatttgttatctttcacctttttgatactagccattccaataggtgtaaggtggttttaagtggcatttccctgattagaaatgttgagcttttttttttcatttttttttttttttggccacttgcatgtcttcttttatgaaatgcctattcaggcaggtcttttacccattttaaatcaggttttttgttttcatgctgttaagtttcttatatattgtggctattagcctatcagatgtatgatatgcaaatactttcttacaatctataggttgtctcttcctctctgttgtttcctttgctgttcagaaagaaactttttagtttagcacaatcccatttgtctatttttactttcattgcctgtgcttttgaagtcatagccaagaaatgattgcccagaccaatgtcatagagcttttctttatgttttcttctagaagttttacaattttaagtcatacgtttaagtctttaatccactttgagtatatggggtgatataagaattcaattttattcttctgcatgtagacatccagttttctctttaccatttctcgaagacactgtcctctccccagtgtattcttgacacctttgtcaaacatcaattgatcataaatgcctggatttattttggggctctctatcctgttccattggtcagtgtgtctgttttatgccattaccatgctgttttgattactatagctttgcaatgcatttttcaataaggtaatgtcatgccttttggcttttttctttttgctcaaaattgccttggttatttggggtcttctgtggctctataaaaaaaaatgtaggattgctttttctatttctgtaaaaagtgatatttaaagtttgatagagattgcattgaatctgtagatcaccttaagtagtgtgggcattttaacaatattcattctttcaattcatgaacacagtatagctctccatttgtttgttttgtcttcagtttatttcaatgttttatagttttccttgtagagatcttttaccttgttggttaaatttactcctaagtatttttatgctattgtaaatgaaattaccttcttaatttctttttcagataatttgttattagagtatggaaatgctactaaattttgtatgttgattttttattctgcaacattacaggatttgtttttcagttctaacagtttttttagtggagtctttattgtttctatatataagatcatgtcatcagcaaacagacaatttcactgcattctcgcctatttggatgccttttatttctttttccttcctaattgctctgactaggacttccagtactatgttgaatagaagtggtgagagtgggcattcttgtccttgactggcatgcccccaggctaacacagcaggcttgtacatacctcccaggcctgtagccctaccatctgcctctagcagacatgctcccacgttagccaagctgacatgcacctgtgtcccaggcctgagaaacatggccaggggccacccaggatagtcaaacagctatgtaaagcatccaggcccaatccataggccacccctggcaggtatgcccccaggccagccaagccactacacaaccatgcccttcctggccaaagtaacagccccatgaccccaacccaagtgagccaatgccaagttggccaaccactgtgtgcattaatgcttctctggcctgagaaacagttcagtaaacccacccccagcaaagctgcaccaccactaccataaattcttttagcctaggctactgggacacttgcaaacatcactagcctagtttacaaccgaaaaaacttcatggagactacactactgtacccaccttaaactaaagtcaattcacccccactgaactgacacgtcaagactcatgtatataaatacatttttccctatgaaaaccctgtaaaattggaagaggtgactgactattccaccagatgcacagaaatcaacatagaaacatatcaaacattaaaaacaaaaaaatgacacctccaaatgaacacaataatttttcagtaacagaccccaatcataagaaaataaacaaaatgtcagaaggggaattcaacatagtgatcttaaggaaactcattgaaatataaaagaatacagacaattcaacaaaatcaggaaaacaattcatactttgaatgagaaattcaacaatgggatagatatttaaaaaaatagaaatcctagagctgaagaatcaataaataaaatgcctaaatacaatcaagagtttcaacaacagactaaaccacgcaaaggaaagaatttctgaacttggggacagtcttttgaaacaacacaggcagacaaaaaaaagaaaaaaagttaaaaaggaaaaaagaaaatgtacaggatttacgagacatcagtaagtaaacaaatattcacattatgggtgttacagaaggagaaaagtatgaagaagtgtaaaaacttatttactaaattagtataacagctgaagacttcctaagttgtgggagagagaaggacatctagatcaaggaagctcgaagaacctcaaatagattcagatcaaacagggcccctccaaggcagattatagtcaaattgtcaaaagacaaacacaaagaaagaattctaaaaacagcaagaaaaaaagcatcaagtcacatataagagaatatgcattaggctaacaatagatttctcagcagaaattacaggctgggagagagtgggatgctacagtccaagtactgaaagaaaaaacagatagctaaaaattatatacccagcaaagctatctttcaaaaatgaaggaggaatcgaaccattcccagataagtaaaaactaagggaattttttaccactagactggccttacaataaatgctcaaaggagtcttacatctggaagtaaaaagacaataaccaccattatgaaacatgcaaaactataaaactcaccaggaaggccaatacacaaaagagaaagagaaaggaatcaaaacttatcactaccaaaataccacccaaccataaaaataaacaataatagaggaagaaagaaagaatatattaaacaatcagaaaaagaaacagtaaaatgacacaaataagttcttacctatcaataataaccttgaatgtaaatgaattaaatttcccatttaaaagatatagatgagctgaacagatttcttttaaaaaatacccaactacatgctgcctataagaaattcatctcagctgtaaagacacacatagattgagagtgaagggatggaaaaagatattccacacaaataaaaaccaaaagtgagcaggagtagctatacatatatcagacaaaacagttcaagtcaaaaaacctgtgaaaaagaggcaaacagcggcaatatatgataataaaaggaccaattcagcaagaaaatatagcaaatgtaaatatatatgcacccaacactggagcactcagacatataaagcaaatattattagattgaaacagacagatagaccccaatacaataatattaatagttaaagacttcaatactccactgtcagcattggacagatcatctagacagataatcaaaaaaagaaatattggatttaaaatgcaccatagagtaaatggacctaatagtcatttacagatcattttacccaatagctgcagaacacatattcttcttatcagtgcaaggaacaatctccaggattgaccacatgttaggatatgaaacaagtctcaatttttttattgaaatcatatcaactatcttatctaaccacaacagaataaaactagaaatcaataatgaggatcattcaaaactatacaaatatgtggcaattaaacaacaggctcctgcatgaataatgggtgaatgaggaaattaaggatgaaattctaaaattccctgaaacaaatgcagatagaacccaaacataccaacacctatgggagatagcaaaacttgccttaagaggcaagtttaggctgagcacggtggctcatgcttgtaaccccagcactttggggagccgaagctggtggatcacatgaggttgggagttcaagaccagcctggccaacatggtgaaacgccatctctaccaaaaaaaatacaaatattagcccagcctaggtgacagagcaagactctgtctaacgaagaaaaaaaaataccagagactgggtaatttataaaggaaagaggtttagttgactcacagttccacatggctggggaggcctcacaatcatggcagaaggtgaatgaggagcaaagtcacatcttacatggtggcctggccaatatgtgaaacctcgtttctactatatgaaaattagccggacatggtggcatgtgcctgtaatctcagctacttgggagtctggtatgagaattacttgaacccaagaggcagaggttgcagtgagccaagatcatgccactacaatccagcctgggcaacagaaaaaaaaagaaaaagaaaaaaaagaggcagtaatagtgataaatgtctacactaaaaaaactagaaagatttcaaataaacaacttaatgttacatctcgaagaactataaaagcaagaataaaccaaacccacaattagtcgaaggaaaaaaaaataaagatcaaagcagaaatgaaattgagataaaaatacaaaagattaacaaaacaaaaagttggctttgtgaaaagatagacaaaagtgacaaaccattagctagacctaagaaaaaagaaagaatatctaaatttaaaaaaaatcagaaacaggaaagatgtcaaaacagataccacagaaatacaatggattattaaaactattatgaacaactatacacctgtaaatttaaaaatcgagataaaatgaataaattcctcaacacatacaacataccaacattaaagcaagaataaatggaaaacctgaacagaccaacaacaagcaatgagattgaatccataataaaaagtcttccagtaaagaaatatccaagaccagatgacttcactgctaaattctaccaaaattttaaagaattaatatcaattcttctcaaattgtttcaaaaaatttgaagtggaagaaactcttcgtaactcatttaatgaagccagcataaccctgataccaaaaccagagaaggacacaacataaaaagaaaactataggccaatattcctgatcaacacagacacaaaaaatacctcaacaaaataccagcaaaccaaatccaacaatacaccaagaaaataatacgtcattatcactgggatttatcccaggaatgcaaggatggttgaacatatgcaaatcaataaacatgatacatcaataaacatgatacaccacattaacagaatgaaggataaaaaccatatgatcatcccaatagatgcagaaaaagcatttgataaaattcaacatcccttctttataaaaactcctaataaattagggatggaaggagagtacttcaacacaataaaggcaatagattacaaacctacagctaacatcatactaaatgggaaagggctgaaaacgtttttcctaagaactagaataagacaaggatgcccagtgtcaccattcctatctaacattgtactagaagtccttgccagaacaattaaacaagagaaggaactaaagcacactaaattgaaaagggggaaatcaaatagtctgttttcagatgacatgatcttatacatagaaaaacctaaaagctctacctaaaaactcttagaactaataaattcagtaaagctgcaagatgcaaaattcacatagaaaaatcagtagcatttctatgcacaaacaacaaattagctgaaaaagcaaccaagaaggcaatctcatttacaatagctacacacaaaaaaatacctaggaataaatttaaccaaggatgtgaaagaactctacaaggaaaacaaaacgctgatgaaagtaagtgaatagtatacaaatagaaagacatcccatgctcacagatcagaagaattaatagtgttaagatgaccacactaagcaatctacatatacaatgcaatccttattaaaatattaatgacagtcttcacagaaataggaaaaaaatcttaaaatttgtatggaaccatgaaagattcctaatagccaaagcaatcctgagcaaaaagaacaaagctggaggcatcacactaactgacttcaaaatatgctacaaagctgtagtaaccaaaatagaatggtattggaataaaaacagacacctagaccaacagaacaggatagagaacccagaaattcatccatgtatctatagccaactgattttttacaaaggtgccaaaaacactcagtggggaaagggcagtctcctcaatacatggttctggggaaaatggatattcatatacagaaggatttaactagaccccaatatctcaccctatacaaaaatcaactcaaaatggatcaaagacataaatgtgcaatctagaactataaaactgttagaagaaaacacagggaaaatattttatgaataagacctccaaagcacatgcaacaaaagcaaaaataaacaaatgggattatatcaaactaaaaagcttctgcacagcaaaggaaacaagcagcagagttaaaagacaacccaaagaatgggagaaaatatttgcaaaccattcaactggcaaggaattcatattcaagatacacaagaaactcaaacatcttaaccatgacaaaaaaaaattttaatggacaaatgatctgaaaagacattactcagaagaagacatgcatacaaatggtcaaaaaaaatacatgaaaaaatgctctaaacatcagagaaatgcaaatcaaaaccataatgagttatcatctcaccccaactaggatggctattatcaaaaagacaaaaaattacaaataactagaatagctttatttttttaaaaaatcgatatgatgaaatagccaaaaaaaagaagaagaagaaaataagataaagaagagaaaatatcaaccacatgcacttggagaatctacaatggtacagaattcagggacatcccctcaatgccctcgttttaatgtctgtatatgacagtttcccactaaactgcaaactctattaagagcagggagtcctcttcctatcacagtatgaccaatataacttaaacacagtgggagcacatagtaagtgttcaaaggagagagagtagggaagaaaggagagaggagggagggaggaagtgaatgtaggtaattattttgccctccttctatattgaaagcaatctattccttttgagtaacaaccccaatctaccctacagcaagagatggtcttagagaaccactttagaggtgcataaatatctttttcataccataaatcttatatcgattttaaccaacttcaatacagtttccttctcgttacatttcatattttccctcagataatctttatttccttgaacatttctaaggaaattcttcatattatttctaagattgctttactatattgtaaagtcttctcactgaagcattgtaaggaaaaggttaaagaatgttcacaaattcttccaagatgtgtagactcttatttggaggctcttggacttaacagaaaaactcagttttcattatctcttgaatgtctgctattatgtatggggaatatgcattttagaatttgcaacctaaaaggccgctaaattttaaaattcttctttgagacaaaaaattacatcaatcatctgaaatataattagtactgctaaaattgttattactatctactctcattagagcaaaaaaaaaaaaaaaccctttctgtttgtaatttttttttcatgccattctcctgcctcagcctcccgagtagctgggactacagctgcctgccaccacgcccggctaattttttgtgtttttagtagagacagggtttcaccgtgttagacaggatggtctcaatctcctgatctcgtgatccgccagcctcaacctcccaaagtactgggattacagacatgagccactgcgcccggcctctgtttgtaattttaaatttagtaaataccaagaataaacacctttaaatgtattgacttaatgcaatgtacaaataaaggttaaaaccacttgaagaaaaagaggtgtggaactcagcgagacaatctaattgaaacaatctaaaactttaatgtcagtgtttcacagcttgactatgtaaattcataaatttgtttttgatacagtcctgaatcagcacagtaagattttgactaacaacatggaccaagacttatcttgaagcacataaaccatttttgacacatatgttcacaacaacagccttcagaagaaaagggaacagtgaaagttctaagaaactgggcaggaatacttcctaacgttcagtggtttagatgagttgctaaatcctaagttgcaaaagtgtatgtagttcgcattaaaaaaaaaaattacttattcactatgcagacaaaaagtccctttgaacatgctctatttgggggtaattttatgactcaaagagtttgccacatttccccagggatgctttaatcatttctcccttttacccttgaaagacctcaaaaaatccagttatgtgtcatgaatacacatatgtgccagatacattcagaacatagatttcctgctaaataattaagagtggaagagcatgtcttcgtgagctgaatgatagctttctcatatagttgacaattctcttaaaacgcaatattatttcacaataattcctaaatattcattaagggatcagtgtcccaaaccaaagtattacggttctgagagattttctccattgcactggtcagccaaagggcacttttgggagcaatgtctgagatctagaaaagttttagggaaaaaaattagatagatagatagatagatagatagatagatagatagatagatagataataggtaggtaggtagatagatagatagatagatagatagatagatagatagatagatagatactgaaaaataactaaacccaaatcttcacaactaagctaagccagaaatgtctggattcagacacagttattataattcaaaagcgtatttactggagagtataggtaatttctgtgtgtgcttaaaccaaaattagcttaacaatagcctacctaaatggagcaacaacctttttcttctatacttgcccttacttcttctgatactctcttctctcatttttcatacatcaaacacacgaacaagtctctccactagcaaatcattccattattttattaattctaatgtatttttagtctggacacataaattcatataaaatgaaattcatctacctagatcttcattccctgcacttgctgctgcctgtaacctttccaatctgaaatttatttcactgaatggaaaagctagaaataaaatgatagagaataaggtttgccttctttctctcaactactatattatgcttacttctgttaagtaaaggggttgcctcttccatgagggattatattgctttttccaactgagggtctgaaagtcatatttagctattacatttttctaagccaccatttcttctggtctcacataatccttaaggttcatctcccttattctgcttctccaaaagcatggtctcctctgtgtatattctgtttatttatctacctaaaatctaaatatatccaacagcctcttagatcctcctcctttcttgttggtaatttgtagttattattaaggaggattcttctaattcctcttgaaccatgtcatctatgagctaggatccctgacatggaatcatactatgtttttttctgttattttttaaatttgcttcatgaaagaccagaatgacatttctgagtacctggagtctgctctctcttcattgtttcgatgtccaagaataagctattcatatactgttacctctacctagaatgtccttccacctcttctttttctagccaactctccatcataccccaagaagacctactgtgtaatcactttttctcatagaattactttctcatataaaaagtgattacactggagccttccttccagttctccatctctattcttgcaacacactttacatgtgcctttactatagcacttaatacatttcactaaagttaattaactagactgtgagttcttgaaataatctctattggtctggaagtccccagagccttataagctatattcattcatccatttgtttacttatttaatcattcttttaacaatatttttcaagagcccactatataccagcactctttgggcctccaaagatcatcagtgaatgacagagcaagatccctgctctctcgaagcttttaattgtagcagaataaggcctgacaataagcaagaaacaaataaatgagcaagactgtttcagatgtaaattgcaatcaatacaacatataagacaggccatgtattagtgtgatgggaagggtactagagatagggtggtgagacaaagcctctatacatggcaatatttgagctgcaactgaatgacataaaaaaccaacattaagatctggaccctgagtctatagaccctatagcagttggaacaagcttggcatgaccaaggaacagaaagaggctatgtggatggatcttagcaagtaaggaacaaagagttggaactgatcagataaagtcttgaatgtcatagtaaggagtttggattgtattctactgcaattgcaaatcactagagggccttaaaaatagtgatgcaatctagctgatatttaaaaacaaacttgttcttcggttaatagggttgaaaaaggaaaaaaatttgttccacatttattaaacgaatgaataaattatgctctctttatttctatatcatcagcaagttctttgtgttaattttaaaatctggaattgctgtgtcagcattgagacaagttggagaaggaaagctgctactcctgatttgctggcattcctcctccacgagtctgcactcacttcatggttttgatattcaagtacagcctattcatacactattccctctgcagagaggatcctttttctcctttttctgcccaacttttggtcataccccaaagaggtctactaagtaatctacctcgtaaagtagactacatcacctagttggtgggtgatagctactagtgcatatttattgactgaataaagctaatatttcacatcttctacacaagaaggatttgggatctgatatggtagactacatcacctagttggtggatgacagccattagtgcatatttatcaactgagtagagctaacatagctcaaaacttctacacaagaaggatctaggatctttctgccctttcttctcttctctcataccccttcctccctttaccccctaaagcaagacagcattcttagctgcagataaactttcctttggtatagattgtggcaagagagtgggcaggtgaattgagattcccaggggaatccttgccccaatctataccaacggaaagtttatctagctgtcctcgatctaagtcataacctttaatccagcttttatgagtgaaaaacaatatgatattttggtcccatctccctgactcgcatgtctacaccagaactggttctgaattcagagcaaagaaaaggggtttctgaaatccctgtaagacacaatgtgatacgtttggaagacactaaattggaagtttgagggcctggtaaacttgagatctagttgcaactctattgttaactagctgtaaaactttagggcagtcactcaaaatcaataactaacatgtattacatatcaggcacttgttcagcactatctagattatttcatttaaccttcaaaacaattctgatttagatacaattattacctcaatttgcaaaagaaaaacaggccaaagagagtcagtctgagcaccaggatttaaacctagagagcctgactcaagagcctgactcatctttcaccagttttctattttactcatctataaaacatacaggttggacagacatcttccaacactgaatttccctgacatttactgccattaccttttctgtcttttcaaagatgaaatgctcatcttcagtgctctgattttgacaaaattatctccatttctctgttattcctctgtggaagatgaagcacctcctctacactatttacttttgtgaatcattcatggatagcacactgtttagcttgatgattatcattgagtgtttgccaccctcttaaaatgaatgtaaagttaatttaatccacaaatctgagctacaatattttcctcaatattcatcacttcaaattcgtctcttgtcagaaactgatgactcttaaatcaaatcctacatttttgaaatactgaagcttcaactattctctctccagctcctctttctcttccaagtacaaccttcaagtagaagaatctattaacaccctacatttagtttcccaccgcagacttcagcgtgaccagatgcacattgcactttacttcctgttactgtcatttgttttcaggtgagatacatgctgactttgtccaactataattatttggaaccctagccaatactcctaaccaattgttttgttcaatattattcaagttcttcgctcaactttttgttatatgacgaagtgggttgatgagttttagcagactcttcatcccagtttagacatgaccatgaaaaatcagcacatctcatgaatggccaccttgagttggctatgggccatccataaccctcaccttcagagccgccatcacaattcttgacctcctggaaactgtagcatactcctcttccagtccaatatccattggtccttctttttatttgtgagttagaaagtgtaccttattttttgaaggtacagattcacacacatgagatgaaccagggaactgatggatggtgctactgagttctgattggttttttaatctaataataactttctttaactgacaagtcatagttgtatacatttacggggtataatgtaatgttttgatatgtgtatagcatgtggaataattaactcaagctaattaccatatccatcaacttcacctacgtatcatttttcatgatgagatatttgaaacttatgctctcattttctaatatgtaagacattcttattgacttattgacagcttggtgtgccacaaatttcaaaatcatgttttcttttgttttgcaatattttctcaatcgacattaatttttaatacactaataacaggatcttcttggtttttatttccttctgactaaaccatcatgctgaattttctctaacgtacataatggtcagtaaaaatagctaatacatgtttaccaaaggcatgtactataacatagcactactcataagtgctccatactggaaactactcaaatgcccgtcaacagtgcaactgtataagtagattgtggtatattcacacaatgtaatataataagaatgagcaagcttaagtacatgcaacaataaggatgaatctcacagacattgagacaataaggatgactctcacagactttgagacattggagtgaaggaggcctgacacaaaagaataaaactccctgcttccatttctataaaagataaaacaagaggctggacgcggtggctcacacctgtaatcccagcagtttgggaggccaaggcgggtggatcacctgaggtcaggagttcaagaccagcctgaccaacatggagaaaccctgtctctactaaaaatacaaaattagtcaggcatggtggtgcatgcctgtaatcccagctacttgggaggctgaggcaggagaatcacttgaacccagtaggctgagattgcagtgagccaagattgtgccattgcactccagcctgggcaaaaagagtgaaactctgtgccccaccacctccccccgcaaaaaaagtgaaggcaaatcaatgctgttgggagtcaggatggtggttactcctgaggttttgggatagtgcccagaaggaacaaaagtggtctctaggtactggacatgttctgttcttcatctgaatgccaattacatgacagtaatcagtttgcaaaaactcagtgaattctacactttaggaaatgtacattttctgtatacattttaggctttaattttaaaagtttaataaactaaataaaaacaaaataagacaaaagttcccatcatcactaatcatcagagaaatgcaaatcaaaaccacaatgagataccatctcacaccagtcagaatggctattattaaaaagtcaagggccaggtgcagtggctcaggcctgtaatcccagcactttgggaggccgagaagggcagatcacctgaggtcaggagttcgagaccagcctgaccaacatggagaaaccctgactctactaaaaatacaaaattagccgggtgtggtggtgcatacctgtaataccagctacttgggaggctgaggcagaagaactacttgaacccgggaggtggaggttgcggtgagccgaaatcgcatcattgcactccagcctgggcaacaagagtgaaactccgtctgaaaaaaaaaaaaaaaagtcaaaaaacaacagatgttggcgaggctgtggagaaaagggaatgcttatatactgtttgtgggaatgtaagttagttcagccactgtagaaagctgtttggagatttttcaaataacttaaaacagaaccaccattcaagccaaaaatcctattactgggtatatatccaatggaaaacatcattcttccaaaaagacacatgcattcatatgttcatcacagcacagctcacaataacaaagacatggaatcaaattaggtgcccaccaacggtggcttggatgaagaaaatgtggtacatatacaccatggaatactatgcacccataaaaaagaaaaataatgtcctttgcagcaacacagatgcagctagaggccattatcctaagcaaattaacacaggaacaaaaagccaaataccacatgttctcacttgtaagtgggagccgaactttgggcactcatggacataaagatggtaacaatagacaccaggaattacatgatgtgggagggagggaagaaaaaattgaaaatctgttgagtactattctcagtacctcagtgatgggatcatttataccccaaacctcagcatcatacaatatactcaggtaacaaactaatagttaacctttattaagtacttgctttttaccaggtggtatttatctatgtaatttttatgtgctaactcatttaatctacagtaatggaactcagaattccattgtctgtccatcagtacagacaatctgatgctgttctctggagcagagtattggtttaaatgttggctcagttcatttctaggtattttgttttatttcttctgggttttgttcttctgttttcactttgttatttctcagtttactttttataaaatgaaggcgataatagtagctacttcataggttagtggcaaggattaaacacgaaaatacttataaagtacttaccataatgcctaaaacatagtaagtgctcaataaatctttactaaattatagtttctgtcttatcttgcctacaaataggcatcttttgtaaacagaagcattgcaaaatagtccacgagctctttcacatccatatattagaaactaaatcaaagagagcagcatatcatgttccacaaaggaatgaatgaattaattttgcactagagaagaatatcatcctaacaagtgaagatggtgattagataatggtaagaatgcatacagacaaatttaaaacaaccaaaatatacatcttggttatcagcataaggctttctggaaaaaaaaaaatcaagagaaagggataagtgcaatgatgctcctctctgaatcctgacatttgtgacagctgtgtattttcacatgcatcacagaagtatgtgtgtagtgttgactgctgacttagaggcagaacgcctagatgtaaatcatggctacttatagcacctgggaagatcacttcctccttcctcagttttctcactggcatgataaggatgattttaatagtacccaccttgtaattgaaggttttaagcagttaatatttgtaaatgactttgaatgcttagcatatagaaagcattaatagctagcaataaaatataataagttaaatatccagccgggcatggtggctcatgcctgtagtcccagcactttgggaggctgaggtgggtgcatcacctgaggtcaggagttcgagaccagactgaccaatatggtgaaaccctttctctactaaaaatacaaaagttagctgggagtggtggcacgctcctgtagtcccagctactcaggaggctgaggcagaagaatcgcttgaacccaggaggcagaggttgcagtgagccgagatcgcaccaatgcactccagcctgagtgacagagcgagactccttctcaaaaaaaaaaaaaaaaaaaaaaaaaaaaaaaaaaaatccaaggttttctctggacaaaattatcaattcaaaattctgctcaatttttcctcaattttcttcaaagtacatccacctctttctctccaggactcaaatgcacacaacctagcccctggtaattcaaagccctccttgaaaaatactccatctagaccaagcttctccccgtcatagatcctctcctttgaatctttacaaaatttacttgtgctatgtttcatttcacttaatgtaaaaaaaatgtaatcctttctaataggtaataatgagtgaactttttcagataacatttctgattttaacagagccttctgaattctgctttaagcctagtgaagtgacacagtggtataaacttccagcactatatttgccaactgagagatgttttcaatcagaaaaatattgtcattctcaatcacagcaattatatgactgtccactctactctgaatatttaggagctgtaaattgcaaaacagaaaataattctcttttctactctttcatctccaaataaagggaaaaaatggagaactaaaagaaggaatatgttttgattcttctgttggattttaatttcccctgggaatggtcaggaagctgctatgtgcaagccatcctcctctattttgaaaaactctgtattttccaatactctataagtcaatgagatagttccctccccaacccccaccttgaatttcccttattgactccaggggcaaccacatggtacacatgcatatatgtacacaagtgtgcacactccaatgaacacatatgcataggctgcattgccatccctatgctagcatatagcatatttcctcaaattaaaaaaaaaaaaactagttctgatgccccaaaatgcagaatctgaacctcagtggtagccttggaattacaaaaaaaagaaattaattaaaaacagagaccagtctcagttacagaatctcaagttttattgataacacaatgtataggcatcacagaagtaaataaagtgggccgtttctggtgactcatgcctataattccagaattttgggaggccaaggcaagagaattgcttgaggccagaagttcaagaccaacttgggaaacatagtgagatcctgtctctacaaaaaaaaaaaaaattaaaaattagccaggctggtggctcacctgtagtcccagctactcaggaggctaaggcaggaagattgcttgagcccaagaggtcaaggctgcagtgaactgtgattgtaccactgcactgcagcctaggtgacagagtgagaccctgtttcaaaaaaaaaaaaaaatgtaagtaaagtaatatcccaagctctgtttagaagaccagctacccctgtagtggtatgctgttgcaaccaactgaataactcacttaatctgcacttgtactttagtgcaaaatggtagtgggagtgtaatcagtagagagaagtgagtctttgactgtaggaaattattgagtggtggttaaccccaaaggtccaaacccctgaccttctccctccaaaggcatctggcctgctgaacattgacaatggcatagacccattagggtttaacaccctcccactggatcagggtgttccaggcattttctggcactggatattcccccaaaacagcagcatcaatacatccagatagaaccaatgccaacttttcctagaacacacataccagtcatgggacggggaaggaatgtaaattcttgccatcataaaatcacaaaaagatgactgggaaacattctaaagattggtttcaagctgtatctgatgatgcaaacccgcactaatcaatgactcagaaagtctcagatacaagtgattgctcatgcacaaaaaagcatttccaagggagctgaatccattgagactgaagaatagatcaggatatccaatatagatctttcagctgcctttgatctctgggcagaaaggactgtttaacacactttttaagcttcttcaatatttgggaattcttatggataacctatacgtgggtaccctctagtcactagattcttcaattccccagtgtggccaggtgggctcattagacaagagccaaatgttatcagtctcacatagcacagttcaacgcctccacactgaccaggcggtctgtcttgctcagcctcctaattcctcctggcagaagtgcagaagttctccttggccccactcaccacatttacacacaaaccttggtgccttccacacatttgctcttcaatccaaccgaaaacagtctcactctttcgtggatgtctgcaacgtgaagagaagtacaggataggactctggctgctgaacctgtgcagaaaagaaaaaatcaagttgaatttctgcacacccacagctcaaggcagtactgcccatgatctggacaagaggtcccccgttctgcaccctgtgctcactctagcccccttcctgccacacgccacaccagaaagcaagaagcttatggagccaaacttgtcatgtggaagctgtgcctccttttgtagaccctgcactgggaatctggaccctggattttcctgcccagacatccttgaacccacttccaaggctggaatggaacgtttcaccaggtgtgcctcctaaaagtggatggcactggtcatttgctcatcccaggccagaggagtggctaaggagctgctgtatttaaggactatggacccagctctggagtatgacctggagtgtccatacacatagagggagatctctctcagtaccagaggagcctagtggtggggagaaaaggggagcaggcagggtccaggctcagttttcccaaagctgccacatttcatcaaagaactctgagaagcttgacagtcaaaaatttgcacatagcctcccaggtcaacataaaggtatatttgtcaagataagagaacagaacagattttatttaacagattactagtttgagttataattttaaaatatttaaatatatggtttgtgggcttcaacatgtactcttgttctaaagacaatattgggccagaactgctgaaatgtatttttgcttaatgttgttttcttcagaaaccaacttctgcaggggatctatttctaagaagtctcaagttcacaataaaactctttaagcctagggccaacaacattgctcttcaaaatagcatgatggacacttctcaaaagaagacacatatgcagtcaacaaacatatgaagaaaagctcaatatcactgatcattagagaaatgcaaatcaaaaccacaatgagataccatctcacaccaatcagaatggctatcattaaaagtcaaaaacaacagatgctggcgaggttgtggagaaaaaatgaatgcttttacactgttggtgggagtgtaaattagttcaaccattgtggaagacagtgtggcaattcctcaaagacctagagagagaaataccatgtgacccaacaatcccattactggatatatacccaaaggaatataaatcattcatatcaagactagtgcacatgtatgttcactgcagcgctattcacaatagcaaagacatggaatcaacctaaatgtcaatcagtgatagactagataaagaaaacgtggtacatatacgccatggaatactatgcagccataaaaaggaatgacatcatgtcctttgcaggaacattgatggagctggaggccattatccttagcaaattaatgcaggaatagaaaaccaaatactgcatgttctcacttataagtgggagctaaataatgagaacaaatggacacgtggaagggaacaacacacactggggcctgtcagaaggtgggggggtgagaggagggagggcatcaaggagaatagctaatgggtgctgggcttaatacctaggggatggaatgatctgtgcagcaaaccaccatggcacacatttacctatgtaacaaacctgcacatcctgcacatgtacccctgaacttaaatttttaaaaaataaaataaaaatataaaagtaacaggattaaaaaaaatagcatgacgcccaataagcaccatttccatcaatcctgatacgtgatgtgcctcaggcaatctccagtactcaatcctgaatcggccacattctctgctaacccaacccttgtgtcacattctaagactccactgatatcaaatgcaattgaataaaataaattcccattgtgctgtgcatcacagaaacatagattgacaggaataaaatgaataatcatgtccactttccacttctgcctcctcccattgaggagcattatgctatttaaaatcctaaggaagtcccagtttattatgaagctcaaggtaacaagtaagaaagaaatactaaaaaggctagctgagtggatttacactagaaagagcagagatatgctagagacatgaaatgatgaattggaaaggaagcaggggaatatgagaaaaacaacttgagagacagaatttggggatggggtctgggcagagttgggagtgagagaggagggagatttgggagcagctgccatgtgtatgaactattgagaaagacatgccgtagtggattaaagatggccataaacattgctactacatctaccaagagggagagtgtaagtccattcctgctgctataacaaagtactttagactgagtatttatacacaacagaaatttatttctcacagttctagaaactggaaagtccaagatcaagatgctggcagactgaatgtttggcaaaggcccattccttatagacagtgtcttctttcatgggaaggaagggacaaatgctgtgtccttacatgagggaaggtggaaaaaagggaacatggcttttccttcaacctcttttataagagaactaaccccacaaagtgccaccttcataacgatcattttccagaagggcctacctcttaatattgtcacattgggtctcagattcccacacgaattttggagggacacattcagaccatagcagagagtatccctcaactcctttaactctgagatagcttgcatatttgctttggccaatagaacgtgagggaagtgatgttatgtaacttctgaaagtggtcctaaagagatctgaaggtgcctttttcatgtacttggaggactccctcttagaactgagctcccatgctgtgagaagcccaagcctcgttgagtagccatagtaaggaaaactgagacattctgatggacaatctcagttgtgctcctggctgccaactgccaaccatgggaatgagccatcttgggtgttccagcccaaatgagcctccaaaagactgagccccagccaactgcacaagaactgaaatcacccaattgatctcatcaacccatagaattgcactagataatagccagtgattgatattttcagtcactgatttgagggtggtttgctacacagcaatagataatgaaaagatggggaaagaggattttaagacatttcactgggcattatggatatattctctttattgtgtgttctcaagagattataagaaaattaatttccttttcaattatttctgcacatcagcttagcgttgagatgaagtggataaagacacataggtttcttatggaatatacgtgtaatgccaaccagaagttctgaaataattagcacagaaatcatgcttttcatacacatgcagtaaaatctagattttcatgctaacattcaaaagaatttttttaaaaatacagcaaatttaaaaagaaaatataccttggagaaaaatctccaatgactcataaaatttgaaataactaaaaattgtcaaaattccgtggctagctccatatttctctccaaaaaccactacccaccaaccccctttaactgtaaaccatgtagaaactaaggatctccaaatggtgtactatccttaacagaacacccaggttcagcatctagacctactataaatatctgttaacaaaacctgggctcctcagcatgtcagtctctcaaagaaccacatgttaacatatttgagagaggtttaaagcactcagacagccatcccattctagttgaggtgaccatcgtacactgtgggactccttcctctctaaccaatcattttggcttggaaacacccacagctgctgtgagtccgttctctttaacaacaatatgcaatgctgccaagtttggattgagtggggttgttactttctatatgcaattcagatctctggcatatttgcatcctagactatcccacctacatggtttaaagatatttaactttagtcatagcagagccagataagcatttagccactgtattagttcattttcatgaacactgtattagttcattttcatgctgccaataaagacatacccaagactgggtaatttataaaggaaagaggtttaattgattcacagttcctcatggctgaagagtcctcaggaaacttacatcatggcagaaagggaaggaaacatatccttctttacatggcaacagaaaggagaagtgcagagtgaagctggggaagccctttataaaaccatcagatcttgtgagaactcactatcatgagaacagcatggagatttcagttggaacacagccaaaccacatccttccacccctggcccatcccaaatctcacgtcctcacatttcaaaaccaatcatgccttcccaatagtccccaaagtcttaactcatttcagcattaactcaaaagaccacagtccaatgtctcatctaaaaaaatgaaaagacataccagagactgggtaagactaagtaacttataaaggaaagaggtttaattgactcacagttccacatcactgaggaggcctcacaatcatggtggaaggtaatgagtgagcaaagccacaccttacatggcagcaggcaatggagcttgtgcaggggaactcccatttataaaaccatcagatctagtgagaattactcactaccatgagaacagtatatgggaaacatccccatgattcaattgtctccacctggcccccacccttgacacatgggaattattacaatttaaggtgagatttgggtggggacatagccaaacaatatcacacatcttctttcaagcagaaattgtgggtttgaggctgaatcaatgtatttgtccacccatcagatgaactacttggtggtattatagaaaacctagtctctcttctccatgagcagaatggctgcatctccaactccagaggttctagatcctgacccaaacttcatggtccacaggaatcaactggagtttagaagatccagacactgcctcatatactgatttctgcaaaaatgaaccaatcatttcctcagtcacctccaggaaagcaccatcaataactggatcgtatgtaatccaaccacaaactgaactatctctttgaatggtagaaacacctcaatgcataatgtaggctttaactagaaccttagacacggtatcagaataaggctactaacttggttcctcctcaaatcaattttatttaaatatttgttcaacattcccttagcaggaatatgatgatattaaatttccattctcaaaaattatataaaacatatatatatagtgtgttttatttaaatgagaaaatttatttaaaacatatatgaaaccatttgctatgtaaataaagtaaaccacatgttcctggtaaactgcactacagtgtgccttaattgggcgacatgtataaagccatcattcatattagagtttcaatcaaggaattaagtccaacaacttcaataactcaagtttgtcacctgctgtatcagttaggattgcatttgattgagtggcttaattatactatactggcttttttaaaattacaaagagactatgtacagagtggtttaaattattaaagtattgtggttaatcccagtctccccactgatttgtactaaatctctgccctgctctgtttcccaagaggctgaccttcatgggcagccatactcaagatcttctgccctctggcttaggtgatgaaatggttaggctttgtgtccctacccaaatctcatcatgaattgtaatccccaggtattcagggagagacctggtgggaaatgatgggattatgggggtggtttcccccatgctgttctcatgatagtcagtaaattctcatgagatatggatggctatagtgtttggcaagttcctccttcgctcactgttctctctcctgccaccctgtgaagaaggtccttgctttccctttgccttcagccataattgtaagtttcctgaggcctccccagccatgtggaactgtgagtcaattaaacctccttcctttataaattacccagtctcatgtagtatcttatagcagtgtaagaatgggctaatagaggtgggaagagaaaggatcacatattgatctcccatagtgtcttccccaccactcccatgcctcctgcccttattggcacagctgtaattctggcaattactttcttctatagccacaagttttatgaggcagctcctcttctctgactcaagttcttgctggctccagtgaacactgtttccttccttaatccttctcacttcccagcatttctagtccttgggtgttgtatcatctcttattaattcctataatggttaattttatgcatatatttggttgcgccatgggatgcccaggtatttggtcaaactttattacaggttttctgtgaaggtgtttctggatgagattaatgtttaaatcagtaaactgtgtaaagtggatgatcctccataatgtgggtggctctcatccaatcatttgaagtcctgcacagaacaaaagactgacccttcccaaggaacagagaattctccttcctgacagccttcaaactgaaacatcagccttttgtggctctacggtagccatccagcctttggactggaactaggacattggctctgcaaactttggacttgccagcttccacaatcgtgtgagcaattccttataataaacctctttttaaaaatcttctattggttccatttctctggagaaccctgaaatatagttcccttattcttgttactatctctataaatagtctcttcattgaattattttttgaagtgttttggtccttcacctgtgtctgccagaacactacatgacacataaggtttttctttcgtcttcacaatgttcaaaggtaggcaatcaggttcaatgcagaagtccacagtgttgctccttctgtctccctattttgccatccttggcaagtgactttcattaacatacttccaggatactccatgttctagaggaataaaatgtgaagggactgagagctttctcttacaaggtgttactcagaaatgtaattttatgccagcaccttgggtggctgaggtgggaggatcacttgagctcagaagtgcaagaccagcctgggcaacacagtgagacccttctctactaaaaaaaaaaaaaatcagctgggtgcggtggcatgcacctgcagtcccaggtactcaggaggctaaggcaggaaggtcatttgagcccaggagattgaggctgcagtgacttataatagcactactgcacttcagcctggacaacagagtgagaccctgtctctaaaaacagcaacaacaacaaaatgtaattttaaccactgccgccttacccccaatatactttagcccatactttactgtccaaaatcttgcccatgggcactcctacctgcaagggagctggagatattgagcgttttgttttctagtcttaagatagagaaaggcaaggaatgaaggagctagtcagggggtcagaaggctcaccctcaacacctgccacatttgctcttcttgaacctcatatccattttcctcctatgccaccactgctctcatatgtcttttaacacattttcttaaaagggagaaaaaagccttttcccctgacccaattgcaaaattattttcctttctgccatcatccttgacttctgattctgcatcacaaaagccaaaacacaaattcttctgtcacagcagcccccttcaaaggatgcagagagaacatgatggaccagagaaaccagaatcttcttagcaggtagaaggaaatgaaagtctaggaacacacagacattaatactttgcatgccattttatctggtttcagaattttggctgctgacaaccgccagctccagacaactatcaagtgtctggtcttagagctggtgacaccacctgtagttacattatgtaatttgcacttacacatcaccaaaattctaaacagaaattaaaaaatacataatatatgtacatttatataattttttatctcaaaatttctaacatcatatggtcacacacggctgcctcacccccctgagcatcatattcatgttccagataggctttgttaaatagaggaagctctcccccagttcccgggaagagacacaaatttatacattaccaattattacatactactaactgcttagggtgtggtctgaagacatctgagttaactggcaccaaaattccaacagcaattcaatgaccctataatcagctctctaggcagttgcttcctagcacttaaggagtaaaagactatcgaagaacgacaacaacaacaaaatcagtattcagagagaaatgtaagacaaccaggggagaaagatagaccttcactgttgaatcatctctaacttgtgatacacttcccagacatcttagccttccttcagtatttccctcctaggagcagcctcaatacttagatactaagatggacagttcagtgacactgacctgaaatattctgaggtcagcactgaaaaaagacttcctctattttcaaagatcattgcattgctttcaatataatgacctaaaagatatttggaaattagtttagaggatcagaagccctttagaaaaggtgatgctctattttgtaagtaaatatattttgatcttcccattataaatctttatatcacgttgtcttagtgtttcttagaatggttgttctatcgaataccagaacatatcaaataagcattcaacctaaataaatacttttggatcatttctgtcagtattttacattttcagtcatacttcataagcctaatcacaacctttgagttcaaataataatattatgaatcaatttaacataatgcttaatacttattaaatttaataaacaattgttaacattgtaagccagataacttcactttataaacaggaaagaagccatgctattggaatccatacatattccttcaaatctgtacctcaatttattgtttttatgcctacacacttcaatcgttactaaaaaccagctgctttccgtgtatataccatgccgctcctccttaaatcaattgcagcttctcttgattaaccaatggtagaatgattcactatgtcaataaatattctgaatcatagaacaatgtagaggacgtggcagacagctgctgaacatatttaaacctcatatttcagtttaaaaaggcacgtatcctaaagtgcatgtcagtctctggatagcaaaattacagcgatgtagttttcctcacttgaaatttacattttaatgaaagcactttcatgtattaataggtaaatcttttcaggccactgccaagactcattgctttgcaatctcatactgttttagagatcctagtccactacattaaaaatgtgcttataaatgttaagcctccatagtatattttaaaggatagggaagtattttctctttaatagaactagtttcaacattgatacatcatttttaatttacaggagaaaaggtattatcagagagctttctctcagtttatatagaggtaagaccattcttagcctcaaattcaagactactacctttctgaactccagtaggaactatagtcctactgtaggactattgactatagtcttagttccaccacaagattgatgagaacattgcaaacagagcactaataagttcctatttctttgaaaaggtagctgtaaaccttcagcacacatgctagatgccaaatactccctactggccaagtcatcaattgcaacattgagtgcccccagtgcaaaaaacaacatggtatcatccaagatcagtaaaagcatacatagttaatgtagctagcacttatatagcactttctttgtgccaggtattattataaatgctttacataaactgattcacctaatccccacaaataaccctgtatggtaagaactactattgtccctattttatagatgaggaaaccaggtaaagagaagttaagtaactctgctcagggtcatcagctagaaattagcagtatgtcctcagaatctgtgatattacataatatgctgacctaaaggaatatgttcaactatcaagaaacttaaaaattccactgaacaaaacctttcagatgaaagagatgtgggaaaattagcaaggtaatagattagattaaggaaaagtaaagaactgctaagccacacactgtattaataagcaaagcattgtgatcagagaataccccacttctgtttgcattagagataaaggatgcaaataatgcctttgattaatattctctttaattaataggaatcctgggctgtgataaaatgtttcaaacattgtatctgagagttctgaagttgcatgaaagactgggattgattgataaataacaggctcaattctccctgtgtgatgtgctggccagcacagctattcagctattccaggaggcagctctctgagtttgacccaactgatttgagcattatctcgctgtgcagataatgtcacaggaataggaagcttctgaaagagcagcatggccttgctgactctgcagtagccacagagataaatgcctacagataaaatgaccacctcatctaggtttgccggagactttctcaggcttagcactgaagtcccacattccaggaacctctctttcctgggaaaactggaacagtttgtcatcctagagccagtgttttcttggctgtgggcgaagtagctgggggttgaggcaaagaacagaggcctcagaaagacagatttatatcccaattctgcctctgccactcacaatacaatctgggacaagtcacttaccctctctgagatctcattttcgctatctggaatataagtataattgcccccattactttgtctgaaaaataaatgagaaaccatgaaaagtttctgaaaaagtgtctgacataaaatagctgcccagcaaatagtaggtgttcgtactatattccaggaattataaaatcaaaccgtaactatataagcaactctgtctagacagggtttttttttaattttcttgaagtgggaagggggtgcatttatgataatgattatttcagcttttagaaagtcaattcatttaatgggatttatttatcaaaaagccgtgttgactcatgcccaatggttgtaagatcacgttctttcaaaactccatttatgagtaaaattcaaatagtcttttctaaagttaatatttaagaatgcatttacatttgaaaaaattgaaaaaatgaagacagcactttcatttcagtaaaattttaggaagataaaggtctgtggaaacaaaattattcaaaatgtccaattacctcagttacactataaggttcttaaactaacctgggtttttatctaacaaaactctggtttatactaagtatgttttaaaattttacttagaagagaatcagtacataatccatattctttaatatggccagctatgataggtttcccagaatagagcccttaaattctataatttttatttttgcatagatttttaaaattcatttttaaacaaattattatttttgtgtcctatgtttttctctaaatacctactaaagtaaatgcaatttgctatacttgaatttttaattacataaaaagaaggtattttgattacttaatttcaaaattcaatctctgattatctaccttctactatagaaaggctttaatacacactcccaaatacggaagaaaaagtgatgcattccacgctggaatctgttttacctacctagaaagtcttttgctaaagtacaatattaaataagaattttcaaatcttactaaaaattttccttcctaaaataatatttctactgtattttaggaagcgttttatatttcagcccataaaattgtcagtttatgacatgatacaatttaggctgaacagttaaaagattctgagaaggaaacttgaattgctcagagaaagtgtaaaatcccatgtgttactaaaatcaagggactgtcatgataaaaattttctgaatgccttgcaagttggatacttcatttaaaaactccccacccacaatgttctctgaagcatatcttaaagccccaaccaacccttccattccttagcatagaatacatgttggtttcttttttgcaacatgtgctttctttaaagtcaaatatatgacactgaatcttgaaacattacaggaaagcgatttagattcttctggttactgcaacatagcaaaaaaaaaaaaaaaaaaattaaaaatcccctgtctctactgctcatgttccctcttaaataacaactctttaaatagagatccctgttaatattttatgaaataatgaattgtcttttccattcatatttctttatatttcacatcgtgtcttattttttctctgctcccagatttctgataattctagaatccgtgagatgagtccaagcaatacattcagtaactaatctaagcatttgcagccactgaatgtatcacctggacttatcttttgagcgtattttaaattgggtagagaagactctaaataaaagtctttctctttctaatataatgcatttgtaaagaagcatattagatctgttaaataaataaatatttactaattaagtttgctgtcaatgttataagcaaattactttacaaatggctgatctggaatttcaggagctcaattgctgaagtaacttatttattcaaatattcttaaactgttgttgtattaccacagtgcagttctatccatgaaactgaacaagaaaatcaaattcacctgaatgcctaagagagctcctcataaatccgtagttcagttttgatttgtaggagaaaaaagaaaaataatgcagattgttccaactattctctactccctaaatctcaagatttcaaattttcactaatatcaaatgccacctcaccaccaccaaacagaatctgtttattgaaggaacaaggccaattgggtgggtttcaaagagatcatgttccaacaattagtttcattttcaaagtttaactctttcctgaatactgtttaactgggaaaatgaactgaaagcccattgaagattttatacctttctacttcctggccatgaaatgtggccttggagtcttagaggtagatagttatattttagagaaccttgaagctggtttgttgtagtaagagaatttacatatttctagatgtttaatttttgtctacaacaaaaattaaagtttaaaaatgtaactaataggaatgaacattgctttgactattgaattaaagagtaaagaaaaatgggtattatatcattaaaatagaacagaatcaaatggttcattttagcacttcagaaaggttgtatcatcagtgtgtttttgggccattttttccatttattataaactcatgattgctaacggaattcaataaagtacttaaattgcacaataaaatattcccatgccactgaaactccttagctattaattcaataattttttgtaacttttgtgaaacattttacctaatattttatgtatgtaagtgtaagctaaaagtttcttcactgttttcacatgatcaatggcttatttgacaggcattttctctttaaaaaaaaaaaaagaaaagaaaaaaagatatttcccctaggctggtgcagtggctcaaacctgtaatcccagcactttgggagaccaaggcgggtggatcgctgagcccaagagttcaagaccagcctggtcaacatacgcagaccttgtctctacagataatttaaaaattagtcaggcgtggtggtgcacatctgtagtcccagctacttgggaggatgaggtgggagaatcacttgagcctgcagtgagacatgaccatgccactgcactccagcctgggtgacagagtgagaccctgtctcaaaaaaaaaaaaaaaaaaatatatatatatatatatatacagtaaacttgcaaacacaaatggcctccttgattctagttactttgcacactttgtaaaaatttaaagtaataacgagcacagcttctcacactccctgctctataactctttcctcattacccatctctaaattcttctaactgtggtacagttcattgaaaaacaaagcactgagtgagctaacattgaaattgtaagaatagtggctattactgcataacaacaagcagaagagcaacatctattctttcttgctgctggaaaccatagaagggcttagtacaatcactcactatgattaactctctacattttaaccacataattctcaacatgaggaagaagctaacctgttgacttgcctagagacaaagaataagagaaaccagaattcaaaactgcagttgatagcagaccatggcgaagacagaccagaaaatgtcaggcctgggagtcaggcctgtgcagaagtcccctgtgcaggcctgggagtcaggatgtgcagaagaaacatgtggggcagttcacaggccagagatcaagtcctcttgagagacgactccctagagaaaaaaaaaaaagaaagaaagaaatcagaatttaatgtcacccaattaaaaaaaaacaagaagcagattcatagagatcatgtgattggcagaataaaggcccctgctaaagacgtcctgagaacctgtcaatatgttatgctacgtaacaaagggaattagggttgcaggtggaattaaggttgctattcagctggcctttttatagggagatttcctggattatctgggtgggcccagtgtcatcacaagggttcttaaaagtggaagagggaaacagaaaaagggagcccaagaaagagaagtgaaaagggaccagggccagggagattctatgttgttggccttgaagatgaggaaggggatcacgagccaaagcatgtgcgcagcctctagaagcttgaaaagtcaaggaaatggtttatctcctagaacctcaagaaaaatatgcagcctgtcaacaccctgattttagctcaatgagacctgtatcggccttctgacctacagaagtgcaaaataataataaattcgtgttgttttaagctactaagtgtgtggcaatttgagttggcagcagtagaaagcatagataagtgctcaggaactgagaacaaacagagagggacaaacagggcatttgataaacatggaaataatgaaaaaatgagtgaataaagaaatacagggaagtcagcaactacattttgggatgcattaaagataaagtctttatcagccacacaacataatgatgacaagtgatctagagactcatcttagcagccatctgccctgaactatcccattctaaggaatgtcgacaaaccatgtctagtgaagtatgagcaataattaataagaaaaaatgtaatatttaaatattaattttaaaataatgaataaaaatcaggcttatttcccaatcccccaagttataatggcagttagtcaagactgagaaaatggttataccttaaagctgctgacctttcatccagcaattaatgcaatctcattccactctgtttctcccaccatacaaaacgtcagtcaccccactgcaccatgctcttcatgtctcctaggccttcaaacctactactgcctcccttgtctcctggttagctcctaggtatcatttattttacagctttcctcaaagaaacctgcatttggctactgattgagttcagtccctgtattagtccattctcacactgctataaagaaatacctgagaccggataatttataaagaaaagaaatctaataggctcctggttccacaggctgtacaggaagcatggctgaggagacctcagggagcttttactcatggcagaaggcaaagccagagcaggcatcttcacatggccagagcaagagaaagagagagagggaggaggtgttatacacttttaaacaatcaactctcatgagaactcacccactatcacgaaaacagcacctgggggatggtgttaaaccattagaaaccgcccccatgaaccaatcaccccgcactaggcccacctccaacattggagattacaattcgacatgagatttggctggtgacacagatcaaaatcatatcaatcccctattgcatattcctgtcgatgcttgtatactccactttagggcatttgtttcacaactgggattttccagtaaaccctaaagcgggaatgctggtacagaccaacagtacagagaagcatcaagaccattttgtattcatatcaatacaaacccactcttgctggtttaactggaccaagccggctctgctgggctgtcacaaatgcacccaaaagacaggaataatgtctaccttactcaacattaacttctcaattctagtgctttgtctgatacaagataagtgttctgacaaatttttgtggcatgaaaaaattgaaaggccaaaacaataaaatctaggtcttttcaaaaaattcattcttgtattccaattttcattttcgtcacaaaaatgagtgttttgggctaccatgtatattctccttaaaagttaatttatactggctcttatactttttttcccagcaaaaagattacaaatattttctgacctatgtttttagcttaaaacataggtaaactatacattatgtcatatatgcatgtgcatataaatatatacacacactatgtcagtcaaggtcctccaaagaaacagaaccaatagaatggatggatggatggatggatggatggatggatggatggatggatggagacagataaaatatcacgaattggtttacatgattatggaagctgagaagtcccacaatttgccatctatcagatagacaggaaaaccaatggtgtcgttccagtctaagtctgaaggcttgagaacagggagcaccaatggtgtaagttttcatcaaagttcaaaagtcttaaaaccagagagacaacagtataagttaaagttcaagtacaaaagcctgggaaccaggagcaccaaagatgtaagtctcagttcaagcgtgagaagacagatgtcccaacacaaacaggcagggaggaaagggatgaatcttcccttcctccactttgtgttctattcaggccctcaacagattgaatgagtccacccatattggagaaagcaatcttctttactcagtctacctattcaaatgctaatctcttctagagacaccctcatagacacacacagaaataatgtttaaccaaatatctgggcacactgtggtctagtcaagttgacacataaaaataatcatcacacacatacatatttatttttagtgatctttatttgtactaatgtgttttgattctagattcatggaatgctctcactctcatttctgaagattcaatgagcaagagatttctggattcatctggctgagtgaaactatactaccgattcttttaatgccatgtgaattaaagcacatacacttgaaaataacaaaattaattaaccagtggtactcaaaaagggcaatagactatacttatttcacatacttattttcccaataaagatggccaagaagtagaagaatctgaagcagactcaggcactgtagcatggtgacacttcatatccagatcacaaactagttagtcatcaaaatcatgactatatcaatacctccatatgtcagttttctattgttgccataacaaattactgcaaattgagctcctttaaacaacttcaatgtattcaatgtattatctcatagttctgtgggtcagaagtctggtgaattcagctggttcctctggtccaggtttcacagactgaaatcaaattgctggcaaactggactcttatctgaaggctctgagggataactcattcaagttgttggaagaattcagttttcatgactgcaaggctaaggatcatatttcctggctagctgttagccaggagcctccctcagcctcttaaggctgtgcaaattcctcatcatgctgctccctccaacatcaaaccagaaagttcccattgagtccctgtactttgaattgttctcgctgctgctgctgctgctgcatctcttctgcctccagttggagaaagctctctgctttgaaggctttatgtaattagattgggcctacttggataatccagaataatctcctcattatatggtcagtaactttaattacatctgcaaagtcccctttgccaactaacataacatattcacaggttgcagggattagggcatagacagctctcggagagaagtctggggagggaacatgctgcctaccacatcccacatctaaaaggaaatacatacagggggtggcagtatcacctttcctctcttctgactcaggaataccgcaaatggtatctagagagaaactggtaaaaaattggaaatcaagaatggaactcaatctttttgaaaatacttagaaactgtctcaagataatttttaaatcatttattctatcttatgataatttaaaataacaacttaataacagtgaagataataaaaatatttattgagaaccagatgggccagattgactgtgctaaattctgttcagtatatcatttatcataattaataaacacaaccacacacacacatctatttctgtacctcctgctctgttttttttaggctgactgcatattactagatcagaaatacattgttttattactattactttgaaatatattttaacaccaagaaacgtaagtcttatttctaaacacccttcattccacacacacaaacacacatattcctcttctatttaaatttatattagctattctcactcattaaatttttataatggaatttaggtacatataattgaattaatcataatcctcagtcaataattattggaatagaactattttaccttatttatttagcgttaatgaataaataaaactaaaactatttaaaaagtaactatggaaggtgatggatatgtaaatttgtttgactatagtaatcattttaatacatatatgtatatcaaaatatggtgtacaccttaaatatatactttatagtatttattttaagataatttaaaaataatgatattgaacaaatacccattaatataccacccacccaagactgaaaatatcaacacaaatttacatatcctccccacttttattctcctgtctctcctcacacacacacacctagaagtaaccactgtctcaaattttgtgtttatcatttccttcctttgtaaaataattttttacataccagcatgtttaatcaaatgtttattttacttgtttttatctttataaaacatcacttttataaatgacttcagaatcatttttgtcaaatctgctccccaacaaaattttacaactttaattgagatgcattatatttataagtgacttggggaagaattattatctctgaaatcatgaattttcatgtattagtggttatgaccattcccacttataatttgtatctctcttcattgctattctttttgttgttatttgaggtttgtctggcaattttttttcaataagctgtattttggatgtatacactagaatttgtttttaaacctataatttctgaattgtctttatttgctctatccaactggtattcttagattacttatattgccttcttttaactacttatattaaccttcagcctgtttcatatttattttttatttaataaaaaacatatttaaaattctaaattatactcttgagttacaagttacaatcttactattctggttgtcatactattcaaaatattccataatcacgattttgttctttgtgtacatgttaaagttacttagtataattgattttttaatttccaagtgattggtttttaaatcaaacttacattgttaatttctatctttcctacactgttcagagtttttgtcctgtaaatcttgtgctttttatgtaacatgcagagtttgtgttccaatatgtgatcatgttttaatattatgtgaacatattctgtttatagtatataaaaattaatagtaataatgatattattaagtgtttattagtaaaagaatagtctggaatatgcttcaaaacatagcagcaataactcactaaatacacacacatacacaaagtggtatagataggtttttaaaggatggcaaaatatgaattttacctcttatcaatataaattggctataaagacagagcaagttgaccaaatagaagccttcaccaatcattctccctgcaggaacaccaaatagaacaattatcaacacaaaagaagcaccttcataagaaccaaaaatcaggtgagtgatcacagtacctggttttaacttcatatcactgaaagaggtgccgaagaggatagaaaagatagtcttgaattgcccacaccacgcctgccccatcccccagcagcagccatgtggtggagaaagaatctgtgtgcttgggggagggggagcacagtgactgtggaattttacattggaactcagtgctgcctgtcacagcagaaagtaatagtgggcagaactcagtcagcacccacagagggataagttagaccagccctagccagaggggaattgcccaacccagtggttggaacctgagttccagcaagcctcaccattgtgggttaaagtactctgaagtcctaaataaacttgaaaggcaacagggactgcaattcctgggcaagtcctggtgctgtgttggattcaaagccagcggatgttggtggcatgcaaccttgtgagacaccagccggggtggccaagggaatgcttgcatcacccctccccaacccccggcagtgcagcttgcagctccaggagagacttctttctgcttaatgagaggagagggaagagtaaaaagaactttgtcttgcaacttggataccagttccaccacagtaggatagggcactgggcagagtcatgaggcctccattccagaacctagcttctgtacaacatttctaggcacacactggcgcagaagggaacctgctcttttgaagggaaggatccagtcctgtcaagaattatccacagctgactaaaaaacctttgggccctgaatagtcagcagtggtacccagatagcactcaccataggctttgagtgagactcagagacatgctggattcccgtatgatccagcacattccgagttgtgggagatatggggaaagcctccttcttcttgagaaatggagagagaagaataaaagggactttgtcttgcagcttaggtaccagctcaaccacagtggagtaaaacaccaagcgggcccttagggtccctaattccaggccttggctcttggacagcatttctgaatctgccctgggccagagagaaacccactgccatgaagggagagtctcaggccaggcagcactcacctcaagctgactgaagagcccttcagccttgagtgaacactggcagtagccaggcagtactccccctgagccttgggtggtggtggacacaaggaaaactcctctgcttgtggaaagggaagggaatagtgagaaggacttcatcctgtggcttggaggccagctcagccacagtagaatagagcactggggagattcttaaggttttccaggccctgtctcctggaagcatctccggacccactggcacttggggaactcaccaccctaaagggaagaacacaagtctggcttgctttgctacctgctgattttagagccctaggactttgagctaatataggcagtagccaggcagtggtcaccacgggcattgggcaagatccagtaccatgctgacttcaggtcagacccagcacagtcccagtggtggtggccacaggagtgcttgcataatccctcccccaactccaggcagttcagcatagggaaagagattccatttatttgggagaaagtaaagaaagagaacaagaatctctgcctgaaaatccagagaattctttcagatcttatccaagaccaccaccaaggtggtacctctacaagtctgcaagagccacagtgttactaggcttgaggcatctcctaaggcagacacaagtgtcatgaccaaaactcagattacaacacctaagtcccttagaatacctggaaagccttcctaagaaagatgggtacaaacaagctcagactgtgaagactacaataaatacctaactcttcaatgcccagacactgatgaacacccacaaacattaagactatccaggaaaatataacctcaccaaattaactaaataaggcaccagagaacaattctgaagaaacaaagatatatgatctttcagacagagaatttaaaatagctgttttgaggaaactcaacaaaattcaagataacacagagaaggaatttataatcctatcaaataaacttaacaaaaagactgaaacaattaaaaagaatcaaacaaaaattctggagttgaaaaatgccactgaagaatgcatcagagtcccttaccagaagaactgatcaagcagaagaaagaattagtgagcttgaagacaggctatttgaaaatacacagaggagacaaaagaaaaatgaatttaaaggaagaaagcatgccaaaaagatctagaaaatagcctcaaaggggaaaatctaagagttattggccttaaaggggaaggagagggggagaaataggggtagaaagtttattcaaaatgataacagagaacttcacaaacctagaggaaaatatcagtattcaagtataagaaagtatagaacaccaagcagatttaacccaaataggaccacctaaagacatttaataatcaaaccactaaaggttaaggataaagaattttaaaaacagcaggagaaaagaaacaacacacaatggagctccaatacatatgagagcaaactattcaggggaagctgtatagcccaggaaagagctgtacgacgtatctaaagtgctgaaggaaaaaacttttatcctagaatagtatatctggaggaaatagccttcaaacatgaaggagaaatgaagacttttcaagacaaacaaaagtggagggaatttatcaacaccagacctgtcctacaagaaatgctaaagagagttattcgagctaaaggaaaagaacattaatgagcaataacaaatcatctaaaggtacaaatctcatgggtaatagtaagtacacagaaaaaatgcaaaatataataacactgtaattgtgatgtgtaaactactcatatctcgagtaggaaaactaaaaagtaagccaatcaaaaataacacctataacttttcaaaacatagatggtactatgtagatatatataaaaacaacaaaaagttaaaaagtggaagacaaatttaaagtgtgcagttgttattagctttgcttgttttttagtttgtttatggaatcagtgttcagttgtcaaataggtaataaaattttatttgcaagcctcatgataacctcagaatcaaaaaacatacaacaggtatgcaaaaagtataaagcaataaattaaaacatatctccagaaaaaaatcaccttcattataaggaagaaaagaagcaagagaagacatccaaacaaccagaaaacaaataacaaaatggtagaagtaagtccttacttatcaataataacattgagcctaaatggactaaactctctaagcaaaagacacagagtggctgaatggatgaaaaaacaagatccaacaatctgttgccttcaagaaacacacttcgcctataaagacaggcatagactgaaaataaagatatggaaaaaaatattccatgcaaatgaaaaccaaaacagtgcaagagtagctatacttaaaatatacaaaatagatttaaggacaaaagctataaaaagagaagaagaaggtccttataacatgataaaggggtcaatcagcaagaggatgtaacaattctaagcatacttgcacccaatactggaacacccaaatgtataaagcaaatattattagacctcgagagagatagagccctatacaataatagctagatacttcaacatctcactttcagcattggacagatcatccagacagaaaatcaagaaagaaatatcagacttaatctgcactatagaccaaatggacctaattgatatttacagaacatttcattcaacagctgcagaatgcatattcttctcctcagggcatggatcattctcaagtatggactatgttaggacacaaaacaagtctttaaatatattttttaaaaaaagaaattacataaaatattttatctgaccacaatggaataaaactagaaatcaataacaaaaggaattttggaaactacaaaaacacatgaaaattaaacaatatgctcctgaatggcagtgggctaatgaagaaattaagaagacaatttaaaaatttcttgaaataaatgataatggaaacacaacacaccaaaacctatgggatccagtaaaagcagtcataagaggaaagtttatagctataagtgcctacatcaaaaaggtataaaaactacccaaaaacgcgtctttaagaacttaaaaaatcaggagtaaatcatacccaaaattagtagaagaagaaaaataatgaagaccagagaagatataaatgaaattgaaatgaagaaaacaatataaaagaccaatgaaatgaaaagtttgttttcttgaaaagataaataaaattgaaaaacctttagccagactaaaaaaagaagagaaaaaaatccaaataaataaaatcagagatgaaaaaagagacattacaactgatgtcacagaaattcaatggatcatcagaggctactatgagaaactatatgtcaataaattggaaaacctagaagaaatggataaattcctagacacatacaaccaatcaaaattgagccatgaagaaatccaatacctgaatagaccaaaaatgagaaacaagattgagccacaataaaaagcctcccagcaaagaaaagccctggacccagtggcttccctgttgaattctaccaaagttttaaagaaaaactaataccaatcctactcaaactattccaaaaaatagaggaggggagaatatttccaaactcattctattaggctggtacaaatgcaattgcgatttttgccattgaaagtaatggcaaaacccacaatggcaaaaaccacaattgcctttgcaccaacctaatatgagaccagtattacactgataccaaagccagacaaaagcacatcagaaaaagaaaactacaggctaatatcgcagatgaacatagatgcaaaactcctcaacaaaatatcagcaaaccaaattcaacaacacattaaaaaggtcattcatcatgaccaagtgggatttatccctggaataaaaggatggttcaacatatgcaaatcaaacaacgtgatacatcatatcaacagaataaaggacaaaacccatatgaccatttcaattgatgctgaaaaaacatttgataaaattaaacatctcttcatgatttaaaaaaacaaaaaaacaaaaaaaacaaaaaccctgggcatgatggctcactcctgtagtcccagcactttgggagactgaggtgggtggatcacgaggtcagaagttcaagaccagcctggccaagatggtgaaactccgtctctactaaaaatataaaaattagccaggcatggtggcaggcgcctgtaatcccagctactcgggaggctgaggcagagaattgcttgaacctgggaggtggaggttgcagtgagctgagatcacaccactgcactccagcctgggcaaaagagcaagactctgtcaaaaaacaaaacaacaacaacaaaaaatcttggtaaagaaggaatgtacctcagcataataaaagccagatacaacagactcacagttagtatcatactaaatggggaaaaattacaagtctttcctctcagatttagaacataacaaagatgcccactttcaccaccattattcaacatagtactggaagtcctagctggagtaatcagacaagagaaagaaataaaggtatccaaattggaaaggaagcagccaaattatcatggtttactgatgatgtgatcttatatttggaaaaacttaaagactccacaagaaaacaatgaaaactgataaattcagtaaagttgaaggatacaaaatcagcatacgtaaatcagcagcatttctatatgccaacagccatccgaaaaacattctgaaaaaaaatcaagaaagtaataccatttaccatagctatgaataaaattcaatacctagaaattaaccaaagaagtgaaaaatctcaacaatgaaaaccataaaacactgatgcaagaaattagagagaataccaaaaataaaaggaaaaatatcccatgttcatgtattgaaggaatcaatattgttaaaatgttcatgctactactcaaagcaatctacagattcagtgcaatccctatcaaaatttatatggagccacaaaagacccagaataaccaaagctatcctgagaaaaaaaaaaaaaaggaggactcacattacctcacttcaaattgtactacagagctatagtaaccaaaacagcagaaaacaggtactggcatgaaaacagacacaagaacataccactggagaaaggaccatctcctcaacaaacggttctgggaaaactgaatatccatatgcagaagaattaaattagacccctatctctcacgatatacaaaaatcaaatcaaaatcgattagagacttaaatctaagaccttaaaatatgaaactactaaaagaaaacattgggaaaactctccaggacactggtctgggcaaaaatttcttgggtaataccccacaagcacaggaaagcaaagcaaaaatggacacatatgatcacattaagttagaaagcttctgcacagcaagtaacaaatttaacaaagtaaagaggcaacccacagaataggagaaaatattttcaaactatccatctgacaaggattaataaccagtatatataaagagctcacacaactctgtaggaaaaatctaataatccaattttaaaatgggcaaaagatttgaatacacatttttgaaagaagacatacaatttgcaaccaggtatataaaaaggtgctcaacatcattgatcaccagagaaatgcaaatcaaaactacaatgagatatcatctcaccccagttaaaatgattttatccaaagacaggcaataacaaatgttggcaaggatgcggagaaaagggaagcctcatacatgattggtgacaatgtaaattagtacaagcactatggagaacagtttggagtttcctgaaaaaactaaaaattgagctaccatatgatccagcaaaaccactactaggtgtatacccaaaagaaaataaatcagtatattgaagagacatctgcattcccacatttattgcagcactattcacaatagccaagatttggaaacaacctaagtgtccatcaacaggccttcttattctttagttattttttgcctgaaaaaagttaattaaatctttttttctgaaatgtgaatctaattctcctcccacatcattagagatattgctaaattatctttcttgactgtatctctacctttttctctttttccaggttttttcctccaacataccaatattcttaccagtttttctttttaaatgccttctcttttgaccttcttgtttctcgtagctactatcctacatcattctctttaatgtcacactacttcctacttgcaaaagtggtctacactcttaagtctccaatttctaaccactttaaaacactgctgtaaaacaattctacttccatctttctcgactctcaacattacttttgtcaaggtcatcaaagttttttttgtttgttttttgtttttttttttgagacggattctcactctgttgcccaggctggagtgcagaggcatgacctcagctcattgcaacctctctctcctgggttcaagcgattctcgtgtctcagcctcccaaggagctgggactacaggcatgtgtcaccacgtccagctaattttttgtatttttagtggagatggggtttcaccatgttggccaaactggtcttgaactcctgacttcaggtgatctgcccactttggcctcccaaaatgctaggattacaggcatgagccaccacgcctggccaaagaccattttgttgccggattcaaagaaaattttaaaatgtttatgttacttaacttccctgctgcacttgactttgcagaacatctcctggcatcacaaaatttcctcctcagttggcttttaaggcttgactcccaataagtgaagggtgattacataaatgttgctacattatatactaaagtatataatacaaccattaaagatatgaacaaaagcaccaactgcatttgtgaccctttccatgggatagtcaccttgaagtacaactccttggccaaagaatatgaacattttgagggctcttaacccatattgccaaaatgttttccagaaaagtttcactgtctcattattccacacctactactcctagcctgtctccagtatccacatgagtattgcaagaataaaatgtgaaatgcttggcatacaattaaagaaaaaaaaaaagatttgactcccttgcgattttcctcctaactttcttgctcttccactttttcctcttcagttgtctcttaagtactggggttctctgccaggcttggtggctcacacctgtaatcccagcactttgggaggccaaggcaggtggatcacttaagcccagaagttcgagaccagcctgacacagggaactctatctctactaaaagtacacagattagctggtggcacacgcctgtaatcccagccactcaggaggctgaggcaggagaattgcttaaacccaggaggcggaagctgcactgagccaagatcatgccactgcactccagccggggtgacagagcaagtctcaaaaaaagaaaaaaaaaaggtttggggttctcagacttttgcacaagcctctcttctcacactaatacttatcctagcagacattacataatctccatggcatcaagtaatgcctatatgccagtgagctccaaaatatataccaaaaactaaaataaatgctctgagctctagatcatttaagccaactagggtcttatatctccacttggatatgtgataagcatcttagattcaaaactaaatgaatgtgatcaaaactaactgcataatttcctcccaatacttccttcatagattgtatttttgccttctcccaaaccagaaacctaagaatcattcttatttcatccttctccctgacccatactgtcagttgtcaattactacagtttctaccttctaaatttatacctgttgtaactctccggcactacctttattcaggttcttgtaactgaccagttggatcattgtcagtcttcactgtctccattcttgctccactcaatacattaattagatttctaatagaattattttcctaaaatacaaatgtgattatgccactcatatgctatatctttcaataactctccactgctttgaacataaaattcaaacctcttaacctcatacaccagtttttaatccagcctctcccattaattgtagtcttattactgtccaactcatacccagtacctcggccacactcaaccatttttccctaacaaggcattcactccctttgcatatatgtttccctccaactgacaaaaactattacctttccttggttacctgaaaaattcctatttatcctttcagatatctcatatactatcacctattctctccaccagaggttgtgtcttacaattccaccttccaatttgggttagatttttttccaattttttgtattcttcttataatcaattataacaaatataattttaaaattactgtctctgatattgaactaggaattcaatgaggacagaaatcatgtcttataaatctttctttctgagggcctatcaccaatgccttgtgatcaagatagagatacatagtttaaatgaatgaagagcaagtagttcaacacagacatattaagaatatagatgcattataaggacatacaaggaaatggccaaatcatcaaaagccttgtatgtcagatcaggattttgaaagtcatcagaagattttaataggaaatgatataattaaatgaacacatttaaaagctcatcttcttggtgaatagaccatggaaagataaaactggagaaaccaagaggttttgaaatgggatgaataaacaattatgaaagccaagacaatgactgtgaggataaagagtaggaggaaaatataaaagatactttgagagtggatagaactaaatggccaatttgatatttgttaatgaggcattgaaaaccaaagtcatctccaagacttctccctgagtgactaggaagatgaattattcatttgtaaatcattaaaccacattaagcatatgctctgaaccggaaatatgccagatgccaagaccacgagataaacaaataaaacacagtctctgccctccaaaatataaaggtgtagtggaagaaataaacatatgaacatgtaaaagaatgtaataaatgttatttaaaatctataggcaacatcctgtgggaaaacaaaaattagcacttaactctgtttgggaattagtagtacataaatgtactcttagtggaatcatctccaaaaactgtgaggtacagtcaactgaaataggaaattcaggaagtggagcagattttgaggacagaagggatactattttccatttgaaccagttgagactgagtggtctgtgggtaatgcaggtgacattcgtcacagagtcaggatccagagttcatggagaagagctggcctagagacttctcacaccaggattactacaatggtcttgtattagtttcctgtggttgtggcaaatcaacacaaactagatggcttagaacaacccaaacttattccctcagtgttctggaggaatctgaaatcaagatgttgtcagggccattcgccttccagagggtctataggagaactcttccttgcctctttcagcttctggagactgtaggcattcccttacttatggcagcaccactccagtctctgcctcactggttacattccttccttctcttctgtctcaaatctccctctgtctttctcttacaaggacacttttcattgaattttggacctacccagataatccaggatgatctcctcatctgaaaatccttaccttaattgtatctatgaaggctctttttccaaataaagtaaaattcataaggttctagaaatgtggacatatcatgtgggggccatcattcaacccactgtgggtatcctaactgatttccctatttccaccgcaggttgcctccttcagtcaattctcaatactatagctagaggaaaccttttaaagcttagatcaagttgcttctctgttcaaaacctcctattagcacccactgcaattaacagccaaatggtttaccaagtttgagcatatgtggcccccagttacctctctggcatcatcacctccttctgcccccatgttcactccacttctgccccaccaacctccttggtgttcccttaacatgacactccatctaatttaccatattgtaatggttaattttatgccaacttgactaagctacaaggtgcccagacatttaaccaaacatttttctggtgtgcttgtgatgggaattgggagtgaaactgacatttaaatcagtagactgagtaaagcagattgcccctccctaatgcaagtgggcaccatccaatcagtggaagggccgattagcacaaaaggctgaccctctcctgagtaacagagaattcttcctgcccagtgaccttcaaactgggacctcagcttgttactgcatttttggactcaaactgaaacataggctctttctgggtctaaagcctgtcagcctttagactggaactacatctttggctgttctggttctcaggcctttggactcacactggaactaaaccatgagctctcctgggtctttaacatgcccactcaccctgcagatcttaggagttgttagcctccataattacatgagccaatttcttataataaatcttatatatgaacatcctgttggttttgtttctctagagaatcctaacacatgtatcttttatctatttatcttatttgttgtctgtatcccactagaatgtaaacttcgtgaagactgggaacttttttttttaattatactttaagttctgggatacatgtgcagaatgagcaggtttgttacataggtatatatgtgccatggtggtttgctgcacctatcaacccgtcatctagattaggcatttctcctaatgctatccctcccctacccccccgaccctgcaacaggccctggtgtgtgatgttccccaccctgtgtccatgtgttctcattgttcaactcccacttatgagtgagaacatgccatgtttggttttctgttcctgtgttagtttgctgagaatgatggtttccagcttcatccatgtccctgcaaaggacatgaactcatccttttttatggctgcatagtattccatggtgtatatgtgccacattttctttatccagcctatcatagatgggcatttgggttggttccaagtctttgctattgtgaatagtgctgcaataaacatacgtgggcatgtgtctttatagtagaatgatttataatctttgggtatatacccagtaatgggattgctgggtcaaatggaacttcaggttctagatccttgaggaatcaccacactgtcttctacaatggttgaactaatttacactcccaccaaaagtgtaaaagtttcctatttctccacatcctctccagcatctgttgtttcctgactttttaattatcgccattctaactggtgtgagatgatatctcattgtagttttgatttgcatttctctaatgaccagtgatgatgagctttttttcatgtttgttggctgcataaatgtcttcttttgaggtgtcttttgaagtatctgtccatatcctttgcccactttttgatggggttgtttttttcttgtaaatttgtttaagttccttttagattctggctattagccctttgtcaaatggatacattgcaaaaattctctcccattctgtaggttgcctgttcactcttgtagggtccagccctatggggcttagcgggtgttctccccatatagagattgtaataaataaagacacaagacaaagagataaagagaaaacagttgggcccggggaccactaccatcaagacacggagactggtaatggccccaacggctgggcgcgctgatattcactgcatacatgacaagggggtagggtaaggagagtgaatctcctaagtgattgacaaggtgaagcaagtcacgtgatcacaggacagggggcccttccctcttaagtagccaaagcagagagagagaaggcagcatacgtcagcattttcttctctgcacttataagaaagatcaaagactttaagactttgactatttcttctaccgctatctactacgaacttcaaagaggaaccaggagtatgggaggaacatgaaagtggacaaggagtgtgaccattgaagcacagcaccacagggaggggtttgggcctctggatgactgtgggcaggtctggataatatccagcctttcacaagaagctggtggagcagagtgttccctgactcttccaaggaaaggaaacttcctttcatggtctgctaactaatgggtgttttttcagacactggcattaccgcttgaccaaggagacctcaagagcccttatgcgggcgtgacagaagactcacctcttgctttttaggtcacttctcacaatgtcccttcagcacctgaccctatacctatcagttattcctaggttatattagtaatgcaacaaagcgtaatattaaaagctaatgattaataatgtttataataatgatcaataattgtctatgatcatctctatttaatttgtattatgactattcttattctaactatttttttattatactaaaacagtttgtgccttcagtctcttgtcttggcacttaggtaatcctctgcccacaactctaatgatagtttcttttgctgtgcagaagctttttagtttaattagatcccatttgtcaattttggcttttattgccattgcttttgatgttttagtgatgaagtctttgcccatgcctatgtcctgaagaggacagggaacttttgtctgtcttggtcactagtgtatctgtactgcctaaaaatacgttttctgaatacatgggatgtattcagaaaatctcttgttggattagttcatggaggtgtactcaacaaaacactgtattttccttccaatttaaataacagagtaaacatactatttcttatttccaatggatcctggttcacctaagatatcaacggtctttggcagaagagtcttgcatgaaaacaaattcaaagtacagtaaaatgtcaaagaaaaagggtaaggttctgaatcatgtagatatcaaggagttaaatatccaatgaaaaagataaaaggacagataagaatgtcttctgaaaagaaaatgtcaaaaataggatgtaattgataagttttagattatgcctttgggatcaaatatatcaaaaaagaagttaattcaaagcttctataaatgtgtgtgcataattatatttctgggcttctttgttctgaatgttttctgatttacaggctatgatgtttttattaaaagagaaaaagccattaaattatatcattaaagaatttgaggcagggcatggtggctcacacctgtaatcccagcactttgggaggccgaggcgggtggatcacctgaggtcaggagttcgagaccagcctgaccaacatggagaaatcccatccctactaaaaatacaaaaattagctgggcattgtggcacatgcctgtaatcccagctactcgggaggctgaggcaggagaatcgcttgaacccaggcggcagaggttgcagtgagccgagatggcgccattgcactccagcttgggcaacaagagcaaaactccgtctcaaaaaaaaaagaatttgaaaattctggcttctggttgaagacgattgattgactaagcacatgcatttccttttctccccgacaaactccctttgaaatgacagattataaaaacatgaatgtggcaatgcaggaaaaccaggaaggcttggacagaaacattgaagaattttttgaagatataaagggataagatggatgctgaacttgagaactgaatgtcctcaaaataacaaatgtataagcaaaaaaagtgagtttttccagaagaaatcctggacaacctaaaagcatagacatcaaaatcggagccatctattaaactatgaatttgttggtgaggaatttaaagtatcacagggctctgagtttaagatgcagttgagtacacttttatctcttttatcttttgaggctctgttatagcccagtaaacccacaactgagagaataggaggcagctatcagtaaatatgggatttcaatgaatctctggaagacacaaagcacaagaagaaatagatattggtgatgcaaaacagaggaaggaacagcctaaaatacacacagaggggctgttccaatggaaagagcctcctgtctgccggtaaaatttagaaatattagacttggtatgacagatggcagaagtgaaatacagggacaaaaaacaagacactaaagaagaaacagtcgaacttcttccaaaagccagatttatcttcctaaagaagaaagaatgagggagttcctctctttaaaaaaaaaaaaattgagtgattctgatcagtggtgaatgaaaaacaattgagtgaactgtcagtttttgagaactgaagcagcaccttacagactccctctctagatcctctaaatcaaagcatgtctgttgacaagtcccaactggattgttacttttgtgcatcaaggtgactgggctaagggatgaccagataaccagcaaaatactatttctgggtgtccctttgggggtgtttccagaagagattagtgtttgaattggtagactaagtaaagatgcaccctcaccaatgtgggtaggcattatccaatccattaagagtgcagatggaacaaaaatgccagagaaaaggcaagtttgctctttctcttctagagctgggacattcattttctcctgccctcagaaatcggagctccagggtctcaggcttttagactctgggatttcaccagaaaccccccagtttcttaggccttcagacccaaactaaattatagtactgacatttctgcctctcctgcttgcagacagcagacagtgggatttctttggcttcataatcacctgagccaattcttctaatgtatgaatgaatgaatgaatgaatgaatacacacacacacacacacacacacacacacacacatatatatatattatcttattggttctgtttttttgaggaactttgactaatacaccacccatgttcacagacctcatagctagcttttctattttctcacttttaaatatgaatggaataccaaggatcaccagatatttgtggggcaaaaatgatatgctaatccaaaacaaaaaacctcaaggaaacagataaaacacaaaaaaacaaaaaagaacttagaaaaatgctaattagtcctgtcagagaaattaaaataaaatgacaatttacattttgtatggttcaaggcttagtcagtactggggccctttgaaaaatataaaattagaaatatacaattaggtgcaaaaataatatataaaaaagtcacaatttaatttactggaatcttagagattccagtcccttttttctgagatttatttagctagaaaagctttcatagaaatgcttcttgattttaagctattatttacctttctacttagaagttctacaatttccagcaacttttggtactagagtatggggccacctgcctcatggtaaatctactatgccaaaaaaaaaaaaaaaaagaaaggatttagaaaacaagaatgagatctttaaaaatgtaactgccaaaaaccatctatcaataaaagttttaaaagataaaattcgggaaacatctcaaaaattcgaagataaagatatctgtcccccaaaaatgagagagattagatacaaacgccaaaaatgagagagaaaattagatagaaacggaattaattcaagtagccattgtcagaccaatcaaggttccaggagaaaagggtcagagacaccagagtggaaataattataaattaaatggaaataattacaaattaaaagaggaggctttccctgagcagaaggactcaaattttcagactaaaatatccctctatgagccaaatagattgatgagtaaagacctacagctgtattgcatgactttagaatgaaaaagttaaaaagaaaattctaaatattcccagttagaaaaaaaaaatacaaggtcacatgcaatggaacaaggatcagtctagcatcagactttcattggcaacactagacacgagactacaatgaatcatgtcttcaaagttctaaaggaggaattggcaaattatagcccatggaccaaatccagcctgtggcctcttttgaaaatgaagatttactagaatacagccacactcattcatttacctattgtttgtagcttcttttatgctacaaaggctacacagttgagtagttgcggcagagatcatatgacaggcaaagcctgtaacatttactatctggctctctatagaagtctcctgatcccttccctgaaggaaaattattcccaacctttcaaatcatcctgcaaccttgagggtaagatatatttacaagtttttaagaactaataaattaacctatcatgtactcttagaaagttattagagaatggaatacacaaagtgaaggcataaaactgaaaaggaaaggacatgcaatccaccaaacaatggctctaaccttaaaaagtgagaaaagtgactgggtggcaaccagacaggggcaactggtccttaacagattggaaagatagaggagaggtttccattaaacataaaacttgacagaatagacattgtgatgaagagctaggggcagggaagaaacacggctatggtaaaggcaatactgttcaaagacggaactctattatccctaataatttacattaataatgtaaatacttactattgagtttcaactcatcctataagcaaacatgaaagatttaatatagttgaaaaacagaaagtaaatgtgatcaatcattatagtgtaaaagtaaatgtgcagataaaagaaatcaaaaggtgaagaggggaggagacctaaaggaaagttcttttttctttgtaatatattcatctcacaaagtgggtatataagtaatatataggtcaaaagtaataaagagatacaatggtaaccaatacagaaatcaaaagtgatgatagaaccatattgagcagagggaaaagaggaagtgtggggtacaagtgagctaaaaagtctaaatctgataacatgacagtgacataaacatgttatttataaatatgattgaaatgacctggaaaaaagtttaatgtgttttaaatgactgttttttaagtaacttaagaggaaaaaatacatacacagtcttttatatgtacctatatagttaacatttcccatggtcttcatctttcctgtgaatctgagttaccacctgatgtcactttctctctttctgaaggtcttcctttaacacttcttgtagtgaaaggcagctagcaatgaattagctcagcttttgtttatcttggaatgtctctattttaccttcacttttgaggaatagtttggttggctgtagaattcagtgggcaggtaagctccctgcctcacccaccacatttcactgtatttcagcctccattgcttctgatgagaaatcagctgtctaccatatatggctaatcctctgtatgtgatgagatgcttttcttttgctgctttcaagatttatttcttctttatggttatgatatgtttatctgtggtgcttttttttttttttttttttgagatggagtcttactctgtcacccaagctggagtgcagtggcacaatctcccgctaatttttttatatttttagtagaggtggggttttgacacgttggccaggctggtcttaaactcctggcctcaagtgatccacctgcctcagcctcccaaagtgctgggattacaggtgtgagccaccatgcccacctatctgtgatgctctttatgtttatactacttaggatttattgagattcttagaaaatgcttttcatcaaatttgagacatttgagggccattattttttcaaacttttttctgttctttctcccctctctccttctggaactcccattattggtacattttatgttgccctaaggtttcctttttctttaatcttttttctccacatttttcagattgaattatttctgctgctctttcttcaagttctcttaatttttcctctgctatcttaaattggctgttgaagctgtcaagtaaatttttatttcagttattttatttttcaactctggaatttacatttttttatatgttctggttccctttctatatttcctatatgttaattcatcatcatcatattttcctttcattatttgaacataattcccttttaagtctttggacatatatacaaaacttccaagttttgtatataacttgctcggaagtccttgtctataacccaaatcatctgggttcactcaaagcagtttctattgttgactgcttgctttttaagtaactgagtatagaatatattttcctgtttctttgcatatcttgaaaattttgttttaaaaggtaaacatttttaaatattatattgtagcaactctggattctgttttatttttcttaggattgtatttttaataactctttttaattacttacctaaacaaactgtgaaatcactaatgtctctgctgttttttaattatttttgttttttaggctattttcctaaaggtttcctcccttatgtacataacttagtggtaagccaatgctgtgggcagaggttgaactcaaatacctcatttctataaggctctcacctctgtccattgatttttatgttgttgcaaaatgtattcaatattctcaagtgtctcttggctttcacatttcaccaggctctctcaggcctcttccaagtatgtatagatttctagtcaactgagactgtatgaagagattatctcagcttttctacggatttttcatttccagggtctccccattaaatttctggctggtccacaattcaccacccgccaccatcactgtcaggcttacaaagatatagcttttccccatttggtacaaaccatgtctaccccttttaaacaaagcaaagcatttttgacagaggcaggaggcagacaaagccctaggcagacaggggcaggtccccagtgaaacccagccttcaaaccgaagacagtttaaattctagctacaagttctggataaatccatggactggattgagaacttgtcttcctgtttggcatgctttcctctgattgatccctacccttcacctgtttgcatataactacccttccctaattggttttttacactgtcttgcccacctttgaatggtgcctttgttcaactttttttgcatactcacaaaccactcagcatgcactcccaattctaagcccataaaagccctagacccagccatacagagatagaccaccctactttggatgggggaccaccctcacatcccctctccactgagagctgtttcatcactcaacaaaattcttctctgccctcctcaccctttgattgtcagtgtaacttcattcttattggatgcaggaaaaagaacttgggacccctcttattggatgcaggtacaaagaaggctgtaatgctatggccctctgccctccacaagcagtgatggggcacgatgggaagcagtggtggggccaagccagccctggaaccctgggccagagcagggtgacagcctgacagctgttaacatgctgcagccatccaacaggctacggacagcaggactaaaagagctagttagcatgctgtaacaccccctctggggatttggggtcatgagtacccctgccagggtgccactgcattcccctcatctggacaacagagtccaccataggagtcacttgtgacatacctggtccagccacaagccccacacagagtctgctcctgtgctggtacttggaatggccagctggatcccacactgactcactcacacacaccctcccaccaggggctgagggtacagtcacggcagccatgggatctgcgccagagtgcaagccaggtgtggtccagtggtctgagtagacggggtgtctcctgaggcaagcccaggcccaggaaaggcctgggcagaggtgtcaccagccagaaaatcctgtatcactttcaccttataaccaaattaaattcactccctctggcagcaagctgtttgttttcaacatcattctaatgctggtaaaactcttattcttgccaactaacttggggaagagggagtaggcacggtaccactcaaaaaaataataataataataataaaatttaaaaaaaaaacactcctactgttctctttgaagttctagcagtttttttaagaataagtgtttctcaatttgttgtttgcctttagttgatttccagtgcccaaactcttcacagctccataactggaagttctttatcccagagagatttgagaaaaaaattatacctaaaaacgcaagaacagactgttacaaaacaaaccatgcacaaaaagccacttagaagtattagaagttatttttaagtgcttgaataagaagaaatgtaagctttaattatgagctaattagaaattaataaaaccaggacaacacacataaaaactaatgaaattgagacaaaatagtactcaaagaagtattttagctttaagtttatttataagaaatagagaaagaaattagaaactcaagaaattagaaaaaagacaataaaataaactaaaataaaatagaaggaagcaaagcataaagctaaaaaagggaagtaatgaaatatggaagagagaatgaatcttagtaaataaatccaagaactatttatttagaaaagaccagtgaaacacacaaacttcaagcaagtccaatgaatgaaaatatcactagaatttaagctctataagtgcagatattttgctttgtttgccaatgtattcctagcaccaagaaaattgtctagcacatatgagtactctataaatatttgttaaatgaaagaatgaatgaacaaacatttttaaaaagtttaaggctatgaaaacaaatatgtaagagaattctttaaatattgtatatgatactataaatcttataaatacactcctcagagactcaaaagcagacttaaacaaataaaagcatactaatcagtcatggctgcaatagttctgtgtaacaaataaccccagttctttaaaataataaccatatgtttcatacttgtaggtctgcaggttggctacaaataaactgtaatatgtttggccaccccatgaccaaattaagttcaacacctcagagttccctgactctgggttttgggctctaagccccaggctacacgctaaaggttaggttcagctctaattcatgtagctccatgttcactttggatcagagactactcattgcatgctcttctcatggccgaccacagaagcaaaagaggccaagtcaaatcatgcaagcacatgacttgtactttaaatgccttcatccattaacattccattgtgcaaaggaagacactgggacaggaaaataggctatacccactctagggcactgcacagtcatggcagaaagaagtagtgttagattgaaaataatccaaccagcaacaaaatccagctttacacataattaaagatatgcaaaataagaccacattgaggtaacatcttactcatccagttgaaaaaaattctaaatatattttgtttttgaggttgtggggaaacagccattctcatacattgatagttggaatgcaaactgatacaatccttctggaaaggaatttggtaatcccatgaaaagttatatgtgcatttatcctttgacacagcaattccacatctaaatatctatccaaaaaatatatcagtgtgatagtcagttttatgtatcaacttggctaggctatagttcccagttattcaatcaaatgctaatcttggtgttgctgtgaatgtactttgtagtgtgataagtctatcatcagcttacttttagtaataaagataatcctagataatctgggtgggtctgatttattcagttcaaaggccctaaaagcagaactgaagtttctctgaagaagaagaaattctacctgtagactacagcttcagcttgtgcctgggagttctagcctaccctttcccacggccagccctacatgtttcagacctgtctagccatccctaacaatcacacaaacccattccttacaataaatagcctgctgcttctccttcttgggaggaaccctgactgatacaattggtaaaaatacaaaagacgtattaggttggcacaaaaagttggcacattgaaagtaatgggaaaaaccacagttacttttgtgccaacctaataaacaaaagtagtcattatagcactacttgtaattataaaaaattttaaaaccacacaaatgtccatcaatttggggtctatgatggaagagtatgcaactttattgagaaattatgactatctctatcttctgctaggggatgatatccaagatatactgtaaagtaagaaacaaagatggagaaaagtgtggacagcacactgccatttatctaagagaaagaagcagatatatagagacatagatatatacatatttatatgcacacatacacacatatatgcacatattttttaattgagggatatagtataaaaatattttaaggaaaacaaagaagaaaaaggagaagacaggaaaagaaggtaaaaataccttatttaataaatttgactttgaaaccagacaaatgaattacaaaaatataaaacagaaataactcaatacctaaaaatcaaaagtaaattaaacaagtaaacttaattttgcatcaaagtagcagcaaacaggaagaaataatttcaagtaactttaagacaaagtaattggactgcacatccctgtgaactatactctaaggacaaagagaactaaaaacaattataaagtattaagctgttttcagtaataatagtacagcaataacattggtgctatacattctggtgtgtgtgtgcatgtgtgtgtggtttgaatgaagcaaacagttatattgatgctgttgagggccaggatatttggcatcagagaggagacctgctggtttagtatcaaatactatatgatctcatttgtaggtggaatctaaaaaagttaaactcatagaaatggagagcagaataatagttgccagcgtctggtggcggtagggaaaatgaggagatgttgttcaaagggtgcaaatattcagttataaaataaacaagttctggggatctaatgtacagcatgggtggtgatgggtgtgttaattaattttattgtgataatcattacacaatatacacacaaatcattacatggtacaccttgaatatatacaatctttgtcaattaaatatttttaaataaaaaagaaattgattttaaaaagaaaaataaagctaatatcatgtggttctaaatctgagttagaaatgttcatgagaggtgagttaataaggattaatgcatcagtccatttttgcatcactataaagaaatacctgaggtgacatcatttatttttaaaaagagatttaattggatcatggtgctgcagactatacaagcaactcttcagcatctgcttctggtgagggcctaaggaagctcccaatcatggcagaaggtgaagggagagcaggcaatgtcacatggcaagagagggagtcgggtgtgggggaggtgccacactcttttaaacaaccaggtctcttatgaactgccagagcaagaactcactcatcaccaaggggatgatactaagccattcatgagggatctgcccccatgatccaaacacctctcattaggccccacctccaacattggggattacatttcaacatgagatttggaaaggacaaacatccaaactgtatcattgtaaccctgagcccccaaatgtcacgtccttctcacactgcaaaacataatcatcctttctcaatagttcccccaaagtcttaacttattccagcatcaactcaatcaaaaatcccaagtccaaattctcatctagagatgagttccttccacctatgagcctgtgaagtcaaatacaagttatttacttccaagatacaatgatggtacaggcattgagtaaatattcccatttcaaaatgaagaaataggccaaaagaaaaggacaacaggccccacacaagtcctaaacccagcaaggtagtcattaaatcttaaatctccaaaataatctcctttgacttcatgttacacagccagggcatatttggtgcaaggggtaaactcccaaggtcttggacagctccaaccctgtggttttgtagggtccagcacccatggctactctcatgggttggagctgagtgcctgcagctttttcaggctcaagatacaagctgctggtggctctaccaatctcaggtctggagggttgcagccctgttcccacagatccaccaggcagtgccccaatggggactccatgtgcaggctccaatctcacatttcctttggcactgacctagtagaggttccctgtgggggcttcacccctgtagcaggcttctgcctgggcacctagcctttcccatacatcctctgaaatctaggtgaaagttgccaagcctccttcactcttgcattctgtgaacctgtatatttaacaccacattgaagccatcaaggcttatggcctgcactctccaaagcagcattctgagctgtacctgtggccctttgagctgagcctggagccagagttgcctgaaggcagagagtagcatcctgaggctgagcagggcacctataccttgggcctggcccctgaaaccattctttcctcctaaaactctgggtctgcgatgggaggagctgtcctgaagacttctgaaatggcttcaaagccttttccaattgttttggacattggcacttggctttagtcatgcaagtctctctagcaagtggttgctctacaggatccctcccctgaaaatacttttttcctcctctgccacatggctaggctgcaaactttctaaatttttatgctctgcttcccttttaaatataaattttaactttaagtcatttatttttttccttatctaattgctgttagaagcagccactccattgtttttttgtttgattgtttttgttttgttttttaggatggagtctttctttgttacccaggctggagtgcagtggcacgatctcgactcactacaacctctgcctcctaggttcaagcaattcacctgcctcagcctcccaagtagctggactaaaggcatgcaccaccacacccagctaatttttgtatttttagtagagataggggtttttccatgttggccagactgatctcaaactcctgacctcaagggatctgcccaccttagcctcccaaatgctgggattacaggcatgaaccaccatgcctggcaccaccttattcctgaatgctttgctgcttagaaatttcttccatcagataccctaagtaatcactcttaagttcaaccttccacagatccctaggacatggacaaaatgtgaccgagctctttgccagggcataacatgggtaatctttactccagttcccaataacgtcctcatttccatctgagactttgtctgcctagacttcactgtccatatatccatcagcattttggtcacaaccatttaatcagtctctaagaagttccaaactttccctcatctttctatcttctgaatctgcctgaatctgtcttcctcaatcttctgcctgttatccagttccaaaggtgcttccacatcttcaggtatctttagagcaatgccgcactctttggtaccaattttatcaaaaatttttgtgttgctataaagaaatacctgaagctgagtaatttatttttataaaaaatgtttaattgattcaaggttctgcaggctgtacaagcgtggctccagcatctgctcctgttgagggcctcagggagcttataatcatggcagaaagtgtagggagagcaatgtcacatggcaagacagtgagcaagaggtgggggcggggaggtgcaacactctttcaaacaaccagatctcacataaactaccagagtaagaactcactcatcaccaaggggatggtactaagcaattcatgagggatctgcccccatgatacatacacttctaacattggggattacattccaacatgagatttggaggcgacaagcatctaaactatatcaacttgtccaagaatggctacctgcaggaggaagaagctggcatctgcaaggctctacgaaaacagattacaactcagttacttgaggcaatcaatactgtccaatactgtcaagatttggactcagtatcctattgctactgtaaaacaaattaccacaaattttatggcttagaacaagacaaatttattttcttacagtctgaaagtcagaattctaaaatgggtcaacagggctgtgctccttctggaggctctagtggagaatctgtctcttgccttttccagcttctagaggctgcccgccttccttggcttgtggcccccttccatccttaaagcaataaccaggcaagtctttctcacatcacattactctgacataaactcttgctttcctcttccacatttaatgacccttgtgatcacaatgggtcacccaaataatccaagataatctcttaatgttaaggtcagctgattagcaaacataattttatctagcaccttaattctcacttgccatgtaacatgacctattcccaggttccaggaagtaggagttagacatctttgaagagtccgctgctctgtctaccaaactacccacccagaacatgccaggaaagaggtgtgttcttcctcaactatgaaggctaatgtgggggattctgtcactagtttgtcatgtcatatggctgcaaccataaagctgggaacctgtccctgatcacttcaggagaatagcaaatacttccctaatcatgatccttaaaagcctcaaagtccagaggtgaagtcactatcccaaaatctaacacctcaccctatcaggttgctgcgacctgcctcagaatgtgaatggcaacagcaagacttcattcctgctgctgtccttgagcacatcaattttttccaataaacgttaatccagcaagtgtggtgctattatttgctccatggaaaccaactatagcttagtgcttaaagcaatcaatcatggtcaaacacaatgcttagaccctgctctattagataattttggtgagggtaagaaggtgcttaatgctctgaaaaattaaattaaaagttttgttacaaaagatagtaatgctgtaatggcaaagagaacaacagcaacaacagaaaaaaagaaaacacacacacacacacacacacacacacacacacacacacacacactacatccagaacccatattcacagaacccagagagacaggagcaataaggctgattttgcaatcggctgcagcaaaaatgggttacatccagctgctttcattgggatgaaacaaaaaattatcttactacccttgtggtacctgggcttcctataccccaaaattagttacacaggtagctgcttctagaaccatgtttgcatgctgtataacagattctttaataatatgcagcctatcctggatttgcttgctcatccttgggcacttacatggtctcaggatatttaactccctgcaagattatgtttgtatttgcacacattttattcttcatagaaggccgaagttgcttacagactaactcatatgtatcttttctccatatgaggttgaatcttctattttccacaaattgacccaatggggatagaatgtcttgaattctttcatgtcatttctcaattagaataatttgtggattcagttttcaagtatgatggtaaagtggcatgtacatttagtaagagtggttcatttaatggttagagatacaagaagaaagaacaatggccttcaggatttaagcctgtcagattcagattacagagaaccaagagagttaatggtgtaagtctcaatctagggacagtagatgtatgtccccgctcaaaccatcagtcagagaacaaattcttccttcctccactttttgttctatctaggctttgaaaagactgcatgatgcccacctacatggagaaggccaaattactttactcaatcaaccaattccaatgtgaattttacccaggaacatcatcacaagctacctagaaataatgtttcataacatatctgggcctctgtggcactgtcaaactgacacatcaaattaaccatcacagtggcaatgcaatatttttaaatgaacaaagaaggcagtaaattataatcattagaaattttagtccttcctgatatagttcttgttatttaacttaaaacaagccaggatcataagaggcagcataaacacactaagttaacaggtgttgaagaatcaaagattcataaggtgatgcaaaatgaaactgctatctgagtaggatatataaaagataaagaataattctttattcttcgtgtggagctcaggcttagatcatttttagttatgattcttttctattatagttaagctattttgtttattatcaataaagcagttttttgtgtgtgtgtctgtgtgtgtatacagtactatattacatgagaacttttcacacaataaactttagtttaaaatatattggccaggtgctatggctcacagctataatcccagcactttgggaggccaacgtgggagaatcacttaagcctatagtttgaaatcagcctaggcaacaaagtgaaggtcctatctctacaaaaaatcaaaacgttagccagacatagtggcacatgcttatagtctcagctactagggaggctaaggcaggacaatcacttgagcccagtaggttgaggctacagtgagctgtgattgtaccactgcacttaagcctgggtgacagagaaagatcctgtctcaaaataaaataaaataaattataaaattaaaagcaactatacattagagcaagggactaggagcagggtagcacttgacagcctgggcttgtcctagtgaccctgcttcccactctccccagacgaaggctctgaccattcctttcctccaagaaaaaactcctggctcctgagcatggctacaggaccttgggatttgtttttaactgtaaacctcacgttttggtccttgcagcttgctaaagacaccccagggataggacaaagcatccaagcgatagagcgccaaggccaggccttcatatctaggcctatttttcagagaaaataaagtgggagcctgtctagaccatctttatcttttaattgggatctcagatatatttttccaagcttaatgttatttacctgaacatttgtgtacaaatggcctttaatatatatccagatagatgacctatccagatatggccttttatatatccagatagatagatagatataaaataagcatcctgttataaaactgccaacacaatgtggcatcaccacagcctagtatgacattccagggatgagcagcttgtgtgaggcagtgcctatccagttagccaccctgctgaggatgtacctcaattagaacttttgtgtgtgtgacattgccttctaaagacattctagcagtgtggtgttggtgtatggtgtgggaaacaccaaagacctttcctaccagaataatttgtaaccctccatgtgagcacacagtgtattcaccatttttgtattgctctaaagaaatacctgggactgagtaattcagaaaaaaaaaagaggtttaattggcttatggttctgcagactgtacagaaagcatagcaccagcacgtgcttctggggaggcctcaggaagcttccaatcatgacagaaggcaaatggggagcaggcacatcccatggtagagcacgagagagagacagagctgtcaggggaggtgccacacatttttaaatgaccagatctcatgtgaactcagagcgagagctcacttatcaccaaggggatgtcccatcccattcatgagggatccacccccatgatccaagcacctccaaataggccccacctccaacaatagggattacaattcaacataagatttgggcagggaaaaatatccaaactatatcacaaacctaggaggctctcccattatcacgttgggaacctgcatttaaattagaagatgagaagaaacatctggggtttgtacccaattcccttacactggcattgagagaaagctagtaatacatctattatcttgtcactacccaagagatggtactcagaaaactgaacacttgggcaccaaactttgaggaaatgatcacttcatgtaaatgaggttatcccaacagaaagataatttacatctccgaacatcaaacggctctttggggttccagttatattcccgctgtgtaatatatgctaattcctagagtggaggacccatactggcaacagcggtgacctgagccctggggcctgatgatccggcaccgtggatatttgcttgctctgctttgaggaagaaggtatctgtggtagaacaagattctgatttatatcaagctatattcctaagatctctctcattacttatccttggtctcctttggatcatcaggtcctcaacaagaggtgaaattatttgtaaagagacattaaagagcttatgttacttttaagtcacgtatggttcgtttctcacccggtttaaccactatgggcagttccattttactggcaacagggaagtttactaccatagaaaattagagttagcaaaagtattcctcccacagttctgtttgctgattttctcagaaactgccctcttactgcctacagaatataaaatcagaaggaacaccgtggttattaccatgtaaattcttaagacagagccaggctcattaatttccaggaacacaactaaagctactgcggttgaaatatagtaaaaatgaaaaatgcacaaatgaagtctgaagggtaaagtgggacccagatgctgtaaaactgcagatcaggttggagtttacttttatcctcagtgctatggcaagctatggcagaatttcaggtaagaatgtggcatcagagttaggtttttaaaagaccaccctggctatgtatgcattatgggaggaaaagggaaggaagcacgacaattgtctaagcaaaagaggatggtggtttggactagggtagtagcagtagagatggacagatgtaggtggaatcaggccatggtttagaggtagagtctatacaattcttaatgaactggatatgtggagtgacagaaagtaagaaataacaggtgcccgaacgataaagtagaaggtggcagcaactactgagatgatcaagatcagggagaaataaatttgaccatataaatcaagagttctaccagctgccaccctgaaaatcaatttctgttattcttcaagtaggggcattcataagtcaatataattttattaatcaatattgtattagtccattctcacactgctattaaagaaatacctgagactgggtaatttacaaagaaaagaggtttaattggctcatggttctgcaggttgtccagaaagcatggtgcatctgcttctggggaggcctcaggaacttccaatcataatggaaggggaaggcagagcagccacatcacaggtgaaagcagaagcaagagagtgaggtgggaggtgctacatacttttaaatgaccagatttcataagaatgtactcactgtcatgaggacagaaccaagggagatggtgctaaaccattcatgagaactctaccccatgatccaatcacctcccaccaggccctacctccaaggggattatatttcaatatgagatttgggtagcgacatatatccaaactatataaagatatgccaaatataccaaacactgtatttattaacattcatagacccttaatttgttgagtcaaaattgcacccctgtttaggtcatctttgaatatatacacttgctattcttctgttggcctcctgtttcctagcaaagttaatttaattcagaatttattgattaactaccttgcacctaacactaaatactatgctaagtattatgaggaatagtaatttagtaaataaaacatgaatccagttcttgaacatgttacatttatgttagcaagataaaaacaaacactgataatgcagctcaataagaaaatcaaatgatatagtatgaaatgcaacagttaataatagagaaatctgggccagatgcagtgatttatgcctgtaattccagcactttaggtggctgaggtaggaggctcacttgaggccacgagttcaagaccagcctgggcagcataataaaaccctgtctctacaaagaataaaaatttaaaaaaaaattggttgggcatggtggcacatgcttgtagtcctagctacatgtgaggctgagatgggaggatcacttaaggctaggaatgtgatgtttcagcgagctatgattgtgccactgcactcatcctgggtgacagagagagaccctgtctctaaaataataataaagaaatctgaccatcagtgccataagagtttggacaaaaagtttagactatgaaagctggataagtcagggaagatttttttagaagaataaatatatagaactccaacaaagagctgtgttcaaaatacaggatagaaatcagcatgactaaagttttgttctctgatgatatcaaagatattggtcacttctacaaaaaaaaaaaaagaattttaactacacattcctttgaggcttgaagaaaacgtgggaaactgagatattccttttgtgtttatctacctgaaagcattttgttatttcagagataactgagcctggaacttatatagatgcatacgttttctgtaaaatagaataatgtcaagtgacctcttgggtatgtttgtattagtttcgtaatgcatttgtttacacgaatgataatcttgaagctcaaggttagctcatttccacagtttactgcccctattcatgctactcccttggattcactttgtcccacaccctaaacctagcaccgggataagtttaaaattatattcaacagaattaacattagaatgctgttcttaaaacagacctggagatgcaaaaaaggatttaaaaggccattgggatagctgaataatttaaaaataaagcttggtaaaaagaaaactgaaattattgtatttattacaaaaagcatacacacctgtagaaatcatagatgaggcccctacagagactggtgagatgcttctgagcaaggacccatgagggttgcaattgcccagaggtatagaggataccattctgaggtctccaaagatggtcctcacccctgtatgtttcccctataaatacttttaaaaacctgaaaaaaatgaaaaagaagaatacaaaaagaaagccaaaaaccactttcatagtcagagagtgttgtggactgaattgtacctcccctcacctaattcatatgttgaagccctgacccccaatatgattgtatttggagacagggcttttagaattaaggttaaaatgaggtcagaaggatggtgttctaatccaataggactggtgccctcataggaggaggaagagagagatctctctctctaaatgcacacactgaggaaattccacatgagcccataatgagaaggtggccatctgcaagtcaggaagaaagcatttcctaggcatctaaccagctggcactttggtcttagacttcccatactccagaactatgagaagtaaatttctgtcttttaaccactcagtctatcatattttgttatggaaaccctaacgggttaatacaggttttgatgccaagaaatggaatgctgctataacaaatacctaaaaatgttgaagcagctttggaattgagtagtgtgtaggggctagaagagtgttaaggtccatgctagaaatacagacattaaaagcaatttctggtgaggtttcatacggaaatagagagttggaaagaaagcttcgatcttctcagtgaaaaggtaaatacacataaagagaacgttggcagaaatatagatgttaacagatattctggtgaggtctcaaatgaaaatggggaacattttattggaaactgaagaaaaagttacccttgttacatagtggcaaggaacttggctgaattgtgctcatgttctagtgttttgtggaagacagaacttgaaagcaatgaaactggatagttaacagagaatttttctaagcagagtgttgaagaagtggctttgttcctcctggctggttttaggaatatgtgaaaggagagagattaattgaagaagggattgttgagaaaaaaagaaccagacttgaatattaggaaaattctcagcctacccataccgcaaaaaatgagaaagcatgctctgaagagaacatcaaagtgtagctggattatcacctcataaagagctaatgagattatatgagtaaaaacattttcatttttaactgaagggaacagagatggaacaaaatgaaggaaagctattgaacttcttggatttgacaagacaatagagctatttggctgcacacatacgctattcttaaagaagaggggaaaatgaccctgcagggaatccagaggtcatcagggctgccaccttggtttctaaaggtcagatggtctccacctgaagtcttggaggcgagacctccaactagagccattggggtgatgctgccatcccactgggtctgaaggacagagcatcaaaccaaagaggattgttcttgagcctttagacctaatggagtttgactcactagatttttggacttgcttgggacctatcacctcttccttcttttctacttctcttttttgaaatggaaatgtttaccctattcctgtctaaccattgaattctggaagcacataacttatctgacttgcccaggttcacatctggaaaggaattttgcctcgtgatgaatcacagctggagtcttatccatatctgatttgtaggacatttagatgagactttggactttatgttggacttttgtgggctattgagttaaaatatatattttttgcatgtgagaaggaagtaaatttgggaggccatgggcaatatgctatgatctaaattgtgttcccccacaacgttggtgttcctaccatcaacggtggattggataaagaaaatgtgatatatatacaccatggaatattatgcagctataaaaagaaaaaatcatatctattgcacaacatgaatgcagctggaggccattatcttaagcaatcaccaataaagccctaatcaccaacagaaatttggagatggggcttttaggaggtaatcaatgaggttataaggctagggccctaatctaaacaggagtagtggcattataaagatagggagagaggtgggtatatctctccacatgcacccaccaaggaaaggtcatatgagaacatagcaagaaggtggttgtctgcaggaagaaagtgctcacctagaactgaatcagcaccttgatcttaggcttcctgcctccagaactgtgagcaataaatttctgttatttaagtcatagtattttgtgacagtcctaggactaattcaatgagcaatatgagagtatcactgagttctcagcttggttccaggtgcctgacttatacatgttggtcttcaggcagaaaaagaacacaagaatagacactgctgtctcaaactgtaaaaattttagaagtaaacctagatatcaaattggcaaagaatttgtggcaaagtcctcaaaagcagttgcaacaaaagcaaaaattgacaaatgggacataactaaattaaagagcttctgcacagcaaaagaaactatcaacagagtaaacagatgatagaatgggagaaaatatctgcaaactatgcttctgacaaaggtctaatatccataatctaaaaggaacttaaacaagtcaatgagcaaaaacaaccccattaaaaagtgggtaaaggacatgaacagacacttctcaaaagaagtcatacaagcagacaacaaacatatgaaaaaatgttcatcaccactaatcatcagagaatgcaactcaaagccacaatgagataccatatcacaccagtcagaatggctattactataaagccccaaaataatagatgttggtgaggctgcagaaaacaagggaatgactatacactgtttatggggatgtaaattagttcagccactgtagaaagcagtttggatatctcttaaagaactaaaaatagaactaccattcaacccagcaatcccattctgagtatatacccaaagggaaataaattgttctaccaaaaaggcacatgcacttgtatgttcactccagcactattcacaataacaaaaacatgaaatctacctagatgtccatcaatggtggattggataaagaaaatatgatatatacacaccatggaatactatgcagctgtttaaaaaaccaaaatcgtatcttttgcacaacatggatgcagctggaggccattatcttaagcaaattaatgcagaaacagaaaatcacctactacatgttctcacttgtaagtgggaaataaacattaagtacacagggccgggcatggtggcttatgcctgtaatcctagcacttagagaggccgaggcgggtgggttacttgaggccaggagttcaagaccagcctggccaacatggagaaaccctgcctctacttaaaaatacaaaaattagcctggcgtggtggtgcacacctgtagtcccagccactcgggaggctgaggcatgagaattgcttcagcctgggaggcagaggttgcagtgagcactccagtccaggcgacagagcaagactttgtctcaaaaaaaagcggggggtacacatggacataaaaatgggaataatatacactggagactacaagataggggaggaagggagcgcagcatgggatgaaaaattgcttagtaggtattatgctcactacctgcgtgatgggtttaattgtaccccaaacctcagcatcacacaatatacccttataacaaatctgcacatgtactccctgaatataaaagttgaaaaaaataatagacactgttggtgctcagagaagtctccccagttatttcagagaggaagggggtgggaaagacagtgtagagtaatttactacaggtgactcatcaattcacaaactgaacctttagacactgagccaggccagctgaaataagaatatggttgaggtcagatactgagggaagtgagtgctatgggggggcaggtggaggaattttctctatatgtgatgtgatgatgatgacatctatatggaagcagaatggttcccttccaaggttgttcaagaaccaaaatattttgagaatcttcgtcctttccccagaacctaacttttcctccattatatgaaaatttccaaaagactgtgaaaacctaccttcccaaaatgttcaaatgaagaaaatgagccaagagcaaaatctctacactaccaaaaactttaaattttatgaaaaaagttatctatggaaggcagtgtatgtatagacaaaagaattcttaagaggcatttgatgagtataaatgactaaacaattagagcatagctaaaaagagtctgtaactcactgcagaaaacactagtctcctttgcagaggtttgactttattccagtgttccttatgaaggggtgaatgggaaagataaggttgaaaggttcattctctctaatttgtaaatttcatctatttgatagaaagagagagaaaaaaagccactcctttgccctctgaagggaaaggcatcccagcatttaagagtatcacataacactccaaagcagcaacccatttacagaggaaacatgagtgaaaacaacataggccagaattgggcttccaaatgttataaacagtgaaaggaataaaaattaaattatgataggaaaaaattctctgatgctttgtttgtgaaaaataaaaacaaacactcttcatgaaatctgaacatcttatgaaggctacatttttttagcctcaggcattaattatggttgcgccactgatggagtccaaaggaagccaattcaatccacttcatcctcagggatggagagcaaccacaagtttacaaaataattaattatctccaggttattgtacaacagggtaaacagtgaactgaaaccctgtaccacaataaataagctggtcaaggctgaaatgtgggtctatttcttcactcaccatctctgtcttacattcttccaaagggctgaacttcaagatcgttgagtactaaacctccagaaactatttttatttttttctaccacttttttttttttaaggagagagattggaggctggttcctaatcattccctgtgattattgtaggtttctgtagaatttcatgaaactatgatgtttttagcaagactttgtcattgatctgtagctgtgccagttgtcacaatctattcatcattattgataataagtaatatcaagaagtaccactcttatctggaaggtcattgatgtgagctgctcggtctctggagggtaagatgagggatgagaacaccagccccatcagccctggagacacatccatattactttgcgagggctgctgtgacaagagtaccgcaaactgggtggtttaaacaacagaaatttattgtttttcagttctgtgagctgaagtccaagatcaagatgtcagcaggactggttcctcctgagagctgtgagggaaggatctgtttcaagcccctctccttggctggtagatggccatcttttcccaatgtttcttcacactgtcttccttctatatgtgtttctttctctacacatcatgttctttttctaagaacaccagtcatattggattaggagccaaccctattttaataagacctcatcttgactaattacatccacaaaggccttgtttccacataaggttatattctgaagtactggttggtctacagccataccaccccacacacacccgatctcatctgaagtactgggtgttaggacatcaatatatgaatttgggaggtggggggagggggacacaattcagcccacaacaacatccatggggtacttgtcccggcaggtggccagctcttactttctcaagctatccatttggagcaggtccttttttttttttctttttttttttttttgagacagtctcgctcgcattccaggctggaatgcagtggcgcgatcttggctcaccgcaaactccgcctcccgcattcatgccattctcctgcctcagcctccagagtagctgggactacaggtgcccgccatcatgcccggctaatttttttttcttttttgtatttttagtagattcagggtttcaccattctagccaggatggtctcaatctcctgacctcatgatccagtcacctcagcctcccaaagtgctgggattacaggatgagccaccgcgcctggcctggagcaggtactttttatccatcaccttatttaatcatcatatccctcttagtctgctagggttgccataagaaaataccatagactggatggctgatacaacaacaatttattttctcacattctggaggctagaaagttccagatcaaggtcctgcagggttcggtttctggtgaggactctcttcctggcttacaggaaaccaccatcccattgtgtgctcacatgacctctgctttgactgatttctgagagaaagggaattctggtgtctcttcctcttctcataagagcactagctctatgggattagtgatccacccttttgacctcatttaacctttatcacctcctcacaggccctatctccaaatggggataacattggggatcagggcttcaacatataaagttgaagagaacatgattcagtctatagtaatccctgatgggagacatcattattgtcatttacaggaagctgagacataaaaagtttaacgttcagattccacagctagaattagtgtaaaatgcaggtgtatttgactcctaaaacccatttatccatccactattctgggtgtctcaaactgggacctaaaatgcggaggtttgcacatgacctgaaattacttccaccactgggagaagggaggattgagcaatttcctgtttctattaaagtgcattatacaaacttgtcattctggggatgaaaggtcaccctagaattgcctatgggcaatttcttatagttcaacctagaatgagaaatgggaaattcagaaaggcattgtaggcatctgtaaccagcagagggacgtgccccacctgggtggggaccatgcatccttgccacatgccccactgcacaacttccccagctcctcaacgtcacatggatctggaaagcagggagactggactacggagccagccctccagggttggaactgagtttgaatctcagcttgactacttactaggatctaaggtaacatgtttaatctctctgtgctcagtttcctcatctggaaatagagattataatgctcctccctcatatgatcatagtgaggactgaaagagttaatgcatataaggagtgttaggacaggatctggcacatggtaaatgctttataagtgttagttgttatcatcatgattattcttgtttgaattataagagaaaaagcatgtatcttaagaatagagggttttaaaatgctcccaagttccttaaccaacctgagccatctgtaaattaagtactatgggatttccagctctgacatgtattctgacatgtaactggcatcagtttaatacaaactattctaaaatgtcttgtgcccttgacagggaggtccaagtactggatacttgcaatgcaatccagcagtggccccgtctttcttacaaaaaggccccagtcacatgttgatgaggctagatctattcctgtcctccttctcttccccatatttccttattcttcttcaagtctaaacgtttattgaactgagacccatgaatgagttactcgactaggcttgtaggataaacttgccaggctttagatctatttgttcctttccatcccccaaaatcaaatggctgctccaggaaaatgttccccttgtggcagggtccgggagaaaagagagaagcgacaaaaccaaaaattaaaacgaccgaagtcccatatgctccaggaatatgtcctggagatgggagtggagggcagggggagaatgttgttgaggtcaaaatttttgaagttttaagtcctatatcttgacatcccgagtataaatgcgggtaccagacacagtacaaacgttctcaaagcccagttacgtattccaaaccaaacgcgggctcttgaagggtgatgaggtagggatgaaatccaggatcgcctgaagaccatttcttcctctcttagggacctgctggtctccagctgattcggtccaggaggaaaaacctcccacttgctcctctcgggctccctgcaaggagagagtagagacactcctgccacccagttgcaagaagtcgccacttccccctccagccgactgaaagttcgggcgacgtctgggccgtcatttgaaggcgtttccttttctttaagaacaaaggttggagcccaagccttgcggcgcggtgcaggaaagtacacggcgtgtgttgagagaaaaaaaatacacacacgcaatgacccacgagaaagggaaaggggaaaacaccaactacccgggcgctgggctttttcgacttttcctttaaaaagaaaaaagtttttcaagctgtaggttccaagaacaggcaggaggggggagaagggggggggggttgcagaaaaggcgcctggtcggttatgagtcacaagtgagttataaaagggtcgcacgttcgcaggcgcgggcttcctgtgcgcggccgagcccgggcccagcgccgcctgcagcctcgggaagggagcggatagcggagccccgagccgcccgcagagcaagcgcggggaaccaaggagacgctcctggcactgcaggtacgccgacttcagtctcgcgctcccgcccgcctttcctctcttgaacgtggcagggacgccgggggacttcggtgcgagggtcaccgccgggttaactggcgaggcaaggcgggggcagcgcgcacgtggccgtggagcccggcctggtcccgcgcgcgcctgcgggtgccccctggggactcagtggtgtcgcctcgcccgggaccagagattgcgctggatggattcccgcgggcagaggcagggggaaggaggggtgttcgaaacctaatacttgagcttctttgcaaagtttccttggatggttggggacgtacctgtataatggccctggaccagcttccctgttggagtggccagagaagtgtgtaaaacacactagaggggcagggtggaaaaagagactgccttcaaaacttgtatcttttcgatttcattttgaaaaataactacaaatctattttaattttacaaagttagactcatagcattttagatatcaatgtcttcatttaacagaagtgaagatggagcaaacgctcaatcagcgtctgtatttattcgctcctgttgtgccagggtgcgtttttgccgagcggttgcctttctttactcacaaaacccccttgatgtctgtcctccacgttttacgagggagagccggatcttttgaagtttgtatcatctaaagcaggtatattgggatgactatggatagaatttaacctgaaaacactgaagttgacagctgacaaagatataagaatccaaagtatgttaaaaattaaggagctgaggcccacagaagtgaagttacttttccagcatcacacagcagatctaggaccctgtgtgatttgaaaaggccaaggtatctaatgatgctcataatttagtttacattttgtgtcaaatagatgaggtcaagtggacattatgtgtatattccaaagccaaaattactgcttgtaatatccattcatctctccgaagacgtagtgcctcttttatatggctttaacctaatgtataatcgaagtgaattagggcagccagacttttaatcacaggactgatcttttaaaaacgggtatatgtaaagttaattgcttatctatgtgaacagtaatatacactataaaaagttttcaaggcaacttcctgcctgtggtttaatttgatagtcacaatgataggaaattggcagggttaggtggtggtatctacattttgcccatgaggacttgtggctcagagaatttgagttttttctagtaaggtcactaggtccctagtgcacagcctgcttttaggtacggatgtgggatgggggtgtcggcagaccacagggttttgactctcagtttgggctcatttccatgactccttgctgcctccctgatttctgtcaaatgaccaaagcacatttagtaattacttctgctgcaaggactactccttattaggctgtgataagtaagtttcctcacatagtgggtcagctcactctggccacaggacccagcttcctaaccacacacattaagaaagagaaaaattagcactgtctgagacctacaaccacttcaagggagaacagtggtgtttgcacaaatgtctacttttgttttaacctagtcatgtgtaaaaagtgtaattcactggtctttaccaaaaaaaaaaaaaaaaaaacaacaacaaaaaaaaaacaggcatcatagtctgcctgtgctggacgctatgctagacactggagagacaaaggtgagcaggataggcacaaccctacccttacaaacccagaaagttagaggaaaggccatcaggacattgctgtgcaatttgatatcatttcaattttggtaacatagatatttgaactaattagaatgtgctacaaattttgccattctttactttccatatgccaacatggaaaatttgtaaccctcatctttaaatacctcatcttaccagtcctctataaatcaaaaaatctaccccaaaaagccctaggttttaacttttgaaaagtttttttttatcagcttttcaggtcatgactaagatctgccattcaatttaaaggaattctttcattttagagtaatagttactaaaatcctttattcctacctccttgagaatctaatggaaattttatatgctcttcccagaaaatttttgttaatgtgtatcctcacacaccaatttgcattcgatgttagcaggctagagacttccttgaatctcagccatgaccctcttcgggggtccactttcataatcagtattctaaacctagtaggcataaatagcttgaatagaggaaagtggtatgtagactcttgcccttcacttggactgggcacctctatcacttggactgggcaccagctagtgcccttaactagctggtgtctccatttttgatagtcattggctattgcttagctgaagctattgattttaacagccttattgttttgatatcaggctgccactctgcagaagtctaatactggggaaggagcaccggcctgagaaccatggtttgtttctaggaccaactctgcagatttctgtgcctcattttgctcatctctaagatgggtggttgatgggtggcagggactgaaccatttctaaaatcccttacactgatgaaattctgtgattccagtgtaactaccaagctcactttcatatacctcctgagacacagctggtcttagtgaatttatatcctctatgtccaaagtaagtcaaagtaagtaccactataattcactatagaatgtatttttgtctttcactgatcttactggactcaaaactgttacatgtttccttaaattagatagaataaaaaaattgtgaaacactacttttcaaggaaaaatattacaattttaaaagcctctttttatcccacctctcagtagctacaactttcatatacgagtttcacatatatatgaaaaaaattttcttatctcagactcttaaggaaatgcaatgcttttaatatgatcactgctgtgtaattctcatctgccctgaaacacttgttctgtccatcaatcaatgtatttgggtttacaatatgcagagcctcaagcaaaaccagtgcaaaagcacatctatcctcaaataggcacatcatatgtctgagcagttcagcatcctcactcacaagtccaaggctctcagcaatgtggaagaagatgtgattcctaaaattaccacccttacacacagtgacacactcaccagaaagtgaggcttaacatagcttaagtggctgtagtttaaaacagattgtgaatatctgtgctaattctgagaaacaattagcagacatattaaccaattagcacagatcactaatatctgtgctaattgttaggacagattagcacagatattgctaccttgtgtgggtagacagggttaaggcactggcagaaggaaagattagtgaggaatatcaaatagctgatttaatgaaattgtgaggccgatgtttggataaggtgaaacagtgccctacaatgacatttatgccagttctccataaacaagagtgttctacacaaattataagttcctggctgtcttaacaaaatgctatggtcctttatatgctcacacaaataatggttccaagcatgggaaacaggtgccagattgcccaggtaggcatcccagcagcatgctccttagccactgattaaccttgcgcaagttatttcacctgcctgtgcctcaaggcccctgtgtttcaatggggagggtgtgaatactcattcctaaggttgtgaggaggaataactgagttagtatacgtcaaacacttaggtgcttggcacagagggagcctgtgtaagtgtttgctattattttgtttcactagatgatcttgtgtattataagaaatcaatttggaaggtgagatacaaatgcagtctgagaaagtaaagacgttttaaagacattttactgtgtcatgaattttcagagaccacactgacatggtaaaaagttgtttggtttttagaatttttgtttcagaatgcatatccttctccttaaccaaaagaaaaactactaaaatacttctgaaaattatttccaagaaaacattttggtgtaccttttagcagttactttatgacttaaagattaggatgaacaaaataattattttaacttggcttttacctgcttgtagataacctctaatttatataatggttcaattatacagtggtaaatgtatctgggcttgttcttttaaaatagcaagtgtaacatgtgatagatgtagggtacttacaaagtactcaccaagcattgatgactgatgtcattagtatcatggctaacattcactgagccctgattatgaggctggcacccaactaaatgttttgcattgtcacttcatcttcacaaagactttttgaataggttattctttatctccattttcagagaagcaactaagccctaaagaggtttattaacttgccaaataccacacagctagtaacactggtggggtctggaatggaacccaggcaagctgaaaacgacagaacaatgaacactcctacttttcaattcgatttgctaattgttaatatttgccacactggcttatctctctgtatccctacccatctctctctctctctgtctatatctatatgcaaacctggcatctaacttctaaatgcttgagcacggatctcctaagaacaagtacatggttctatgcaatgaaaagacatgattatggcatccaagagtgattttaaaaatcaaggatgaaacttaatttttacccacaagtccagacgatgatttctaccagtattctccagctttactctgtttcttatacttgacagactgagctccaagcctggaatcttctaaaaagggtccactgccaatctggaatgccaacaaatcttattaatatatctccacatttgtaagcttctactaaattctccaagaacctgcatatcagttaagtcctgaaatgctccagtgccaaataaaagcccactgtgcagatagaaatgcttttggtgactctcaaacatttattcaaaggtatttagtgagtatctgtcagctgtatatccagcactgagggaagactcagtctctgccatcacatacacctcagcactaagaagagacacatgaaataattaccatccagtgtgataagtgctctgacagaggatggagtgaggactagtcaccttggggaagacagagaagcagggtcccaccaggagatgagaagccagcctccaggagtgcgctatctgagagggcaagagaaggaaggcaaagaggacgggtccatacttgaacaacttgaagtaggtgtatctagtgcctaagagtgtgtatggtgacatcttgtggagcagtgaacatgaccctcatttggtttgttaaagcattgggtcaaatgccacgggaatgtaacaggtaaatggtctttgccttataacacagggtatcccatccgtgtaagacaatgaatttttaaaaaggcaaaaccaaaccttttgtttacatcatttgccttaaatagttcttagtacacaaattcttccttgcttggggccattatggtgtgtggaagtagaaaaagataaactgtagcttacagaaatagaaaagcaattttttcctatgatagaggcaaacggatacaaaaaacaaacaggtaacacataataagttccaaatgaggcattttgttgaaattcagtgttgagcataaacagtgaactcaaatgcacagaggaggcgtcatggaagggtgacaaaacactccagagcaataacagctaccctattttctgttccctgggagtagggagaaaagacatcaaaatcaaattataaatttaaaaaagtattaaaattctcttatggaaatatattaagaagtttgttaggcaaatggaaaacgttttgtggaaacaagaaataagaaagaatggccatcacttaaagcaacagaatgtatctctcccactagctctcccctccctacccacagctttattcacatttgttctataacatttcagcacagttcagaccttccgctgagccagtgtgaggtcagggtgttgaggaagcgagtccctgcagtcagactccagctggctgtcgtcctgcttctgcttattccacagaatgagtctggtgggggagaggaaattcctaacctgtttttttttacacatcttcatcagaaaagcgaaagcactaattactgtccataataaaactactgggaaggttacttagcttgtaagtaagttccacaaagccatttcagtaaaaacttcctggttctaaaattgggaaaagcaggataatcctctaaggctgacattctttctcttttgtgcatttacaactaaacggtcactgatacacatttccacagtgaccctgcaatatccacattggctttcttctaagacacttcaaaaatacatcacacctttatgtgttaaatatcactattggcatatatctttaaaaacatttattttcttaattctcaaaatacagaaaagaatgttatgctattgtgtgcacaaactgctattttcaataaggagctcttaatttagaaagttgctatttttcaataaagagctctcaattagaaaatatcaagaagtgatgttaagtttttatggaaataaataaagtatcatgacatgaaaagtttataatttttcccccagcaatggcttactcagggaatttttcttatatgtaaagttaatgatctgaaaagtggtaatcttatcattcaccaagatttcaggatataagttattcctacagaacaatccatttttacctttaaagatgagtttgtgtacttcagaagatgtgacgccagttggccaccatctcaatcagtagtaagtcacaccatcaatcccttgttaatgatggaactcatgtgaagtcaagaggaaacataatactctttacctcattccctggtagcagagaagttgactcatctttaatgtcagttattgagatgtaacacagaatcatattctacagaaaatatgtgataaactttacacaaatgaatacactttagaaaggcagtcatttggattttctttttgtcagagaacattgcaagtcttcctgaagaatttctgagaaattaaacactttatatgacattttacagcatgtagagaggttgaaactcagagaactaaaactcagatgatagtctaaatacttaatttgttgctgctttatgctggacatgaaaagtgtgagcttaaattataaataaaaaactattgagctatcaaactatttggggtacatccttatctttcctctaaattactctttattcccattaaaatccacctatcccgggtcctctctcctcagcccttcacctctgctttcaaagatgactaactaacctaataaacacatctaaggtgatgtgtcaacttcaaccccaaccctttttccccagataacttgtctgcatttcaagaacaacctaccagagaccttacctgtcaccttggctctcccacccaatggagatggctctaatggtaaggaattctatcttaagtaaaagggaagggaaacacgctgacagatgcagtttttataaaggcaggtcattggggcaccaagttggcagccgctttcaacttttgattctacctcaaaaggtaaccaagaaatcgttgttattctaaagattatgacaagtccaaagtttcacagaatcctgatttttatacacttgcattaatcactgcttacttccatgatgtaaaccaaaactgcagcggcagaatatagagaatcagaataaattctgatagaaaaggcagatactgtttccacatatacaagtatatgctaattgcttttagcaaactgatccaaataggaatcaacattattccatcttaatgattatgtttttgattggtacacataaatgttaaagtgggaaaatatgcagagaaagttacctaaactaaatcactttaattttcaacaacataattacattccatttcacctactaaaatggctttggacctagaatttgtattgctacatcaatataagatgactttcagtaaaaatagatgtacagttgatttgtaacaacaaattaatagttttaaattatttgtatatttcaaggtaaataaaattagagctatcccacaatcgctttggttatgaaattcgaccactgtaactttttttaaagaaaactttatggtgtgcagttcctttggtatgcaaatattaaatggttggtgctgagaataagcagcaatatagaaatatatataattgtagaagaatataacctatgatttagacataaaatgagatccttacaagataaagagttatggagatggatgataatgatagttgtagaacattatgactaagtgtttaatatagcggacctgtacacttaaaaatggtgaagatgttaaacttacattatgtttacattacatatttcaccacaataaaaaatttttgaaggaaaaccagaactttaatgacaaacttaggacatattatgctctgaatatatagttttgataacgtctttcctggcaaatcaacaaggtaagaataaaaggatattctgaaatctttttttttctttggagacagagtcttgctctgttgcccaggctggagtgcagtggcacaatctcggctcactactaccttctgcctcccaggttcaagtgatcctcctgcctcagcctcctgagtagctgggattataggcgtgcgccaccacgcctagctaatttttttgtatttttagtagagacggggttttaccatgttggtcacgctggtctcaaactcctgacctcatgatccgcccacctcggcctcccaaaatgctaggattacaggcatgagacaccacacccagccagatattcttaaatcttatgctcacactccaccccccccaaaaaaattgtccttcaggaaagcataatttaaggaaaaatttcccaaagtgccaccttcagcttcattcttagcaccagaggaagaattgcctgtcatataatgaaagatccttggtgttatcattaatctagtatacatagtgcttcctcttggtagatttttacctactgtgagaaggaatgattttgatactcagacagtgtgtagtaatttgttaagaacatttaacttggaacctatgctacacagtaaaacttatactgacaatggatatttcatgtggtaggcctaagaagtattgtggagtgaggggactggaagtatatctgcagaactacctagtcaaagaccccagtctaatttctaatatataattcatataaattactcttgcattgctatacattaaacattatgcttgtcacattcttacttggttagcactgtcactactgattgtcaggcctataattgtgtataattcttcccctgccactttaccagctggtggccacaccgattccagaaagaactactttatttcttattacctcatgaaagcaccctctgcccagtgccttggctaatagactggcctttgttgtctatgaccactaattcccactcaggcatatagcaattctgttgttggttgcttagcccagtcaaaaacactggaagtggacatagactccacactgatgaatgaatgaccttctagtcattctaatgtccttaaaagtctactatttttaaattgtagaatatatatatatatatatatatttttttttttttctgggatatttctcctttcttctgttcattaatgtttttcatctatcattgtgttttaaatatgacctaaggttctatagtatatttagacaaacttctcatttctctgcagtgttcggaattcatcatgcctgtatgacaaggttgtgtttgagaacaaaaggggacctgtgtgacatgttttatttcaatatacatttagagtttgaacaaataaaaaaagctattagaatttttaatatatataacacattatcaaaaacactgtcacttttctgagtgctctaatcaggcaattcgtatgtatatttaaaaagagggaaaaagctaattagtatactaaatatatttattttaatacctgtgctcatatgttatctttaaagaacaggaataaaatttatgggtagaatagtatgccagcaatttaccttcaatacaaattaaacacatcttttaagaaaagggcgagttatattggctggggtggcactaacactacattattaatatgtatttattgagcatttactgtgtccaggaccctgtaagggggaaaaaaagtccttgtttttacaatctttattgactgaaattctgtaaaatgaattgaattcctgaagtgacatcatttaacccaaattttttcatcatcaactaattcatctcagaaaacagtaaagtttaaaaaaaaatactatcagtaagaataatatatttccttggtttggaaatttccaaaccacgatattctgccctgtcaaaatatattcactggggaattttttacttcatacgtttcttttgaacttagtcacatttttatatctagctggtttcattattaaataaaagaaaaggtgattcccctcttgtactgcaggagaccacatacttgaatgatactctaacttctaggttctgttatagtaacactgaaatcagaaacctgtgggagaaatgtcactttatctgagagagtaaaatcagactctaaaaggaagtagcaaattcatcttgttcttttttttaatcaaccctctgcctaagacaagtagtttgaaacacagaggactctttaagtcatacttcctttatgtagtcaaaaccaaagccactgggtagtgctttccccaaaggaatctctaaatagtagacggggacattttcagatagattcgtttgtaggcaaacctccattgcttgtatcacatttcctgaaagaataaaggtaaaacttcaactatgtattacagaaagaaaaattcagcctgaaccctacccttataaaacaggttaattgggttttaattttcataaatcataaaggactattttgaacatttgggcctttaattgtctagctcctagatgaagtacaaatcagaaaaaaaaaaaactgtactgtgtcagaatgcaagctttcctctttgcattttggcatttgaaaactccgaagagcggtttttgttttttatttaaagaagatgatacatatgtgtacccgattcaaaactagagaatagaatttaaaacataattttcaaagtcttcaaatatgcctaaaggtaacaatgtcatcttttaattgccaatttctctaccactttcaaaaaattacttccaaggatttaatgagctccttcctttcaacagaaaatggactattttcctttcagatttactatatgctgtcactccagctttataaccgcatgtgcatacacaaacatttctttctctcttgcaggtggcacaaaccaggaaggggaaatctgtggtttaaattctttatgcctcatcctctgagtgctgaaggcttgctgtaggctgtatgctgttaatgctaatcgtgataggggtttttgcctccaactgactcctacatattagcattaacagtgtatgatgcctgttactagcattcacatggaacaaattgctgccgtgggaggatgacaaagaagcatgagtcaccctgctggataaacttagacttcaggctttatcatttttcaatctgttaatcataatctggtcactgggatgttcaaccttaaactaagttttgaaagtaaggttatttaaaagatttatcagtagtatcctaaatgcaaacattttcatttaaatgtcaagcccatgtttgtttttatcattaacagaaaatatattcatgtcattcttaattgcaggttttggcttgttcattataatgttcataaacacctttgattcaactgttagaaatgtgggctaaacacaaatttctataatatttttgtagttaaaaattagaaggactactaacctccagttatatcatggattgtctggcaacgttttttaaaagatttagaaactggtactttcccccaggtaacgattttctgttcaggcaacttcagtttaaaattaatacttttatttgactcttaaagggaaactgaaaggctatgaagctgaatttttttaatgaaatatttttaacagttagcagggtaaataacatctgacagctaatgagatattttttccatacaagataaaaagatttaatcaaaaaatttcatatttgaaatgaagtcccaaatctaggttcaagttcaatagcttagccacataatacggttgtgcgagcagagaatctacctttccacttctaagcctgtttcttcctccatatggggataatactttacaaggttgttgtgaggcttagatgagatagagaattattccataagataatcaagtgctacattaatgttatagttagattaatccaagaactagtcaccctactttattagagaagagaaaagctaatgatttgatttgcagaatatttaaggtttggatttctatgcagtttttctaaataaccatcacttacaaatatgtaaccaaacgtaattgttagtatatttaatgtaaacttgttttaacaactcttctcaacattttgtccaggttattcactgtaaccaaataaatctcatgagtctttagttgatttaaaataatttttatggcccattttcttttgcaaagtacaaattataattccagaagctatctgccaaaaaaagacaatggaagaaaattatgaggacactaaagggaacattcctgactcctaggacacagtattctcatgtaagaatacccatttggctttgccccactttctgttcaagttgtatgtgctgccaagacaaatttcttctcctcactttctgttcaagttgtatgtgctgccaacacaaatttcttctcctaacacctggaatgagcttgtggctccacggagctcccatgtaggtagaacacattcaagagtgtttcttcaggccaggcacagtggctcacgcctataattccaacactttgggaggccaaggcgggtggttcacttgaggtcaggagttctacactaccctggccaacatagtgaaacctcgtctctactaaaaatacaaaaattagctaggcatggtggtgcgtgcctgtaatcccagatactcaggaggctggggcagaagaatcacttgaacccaggaggtggagttcacagtgaacgaagatcgtgccactgccctccagcctgggtgacagagtgagactccatctcaaaaaaaaaaaaaagtgtctgttcaattcattttatctgccactgtatatctacaagaggactccttgctttgagtcccagttcttcaaaatcctgcttgctgcctaaagacacaaagtcatagaacattaggactggaataaactattgtagtataaccttcctgctgttacaataaaaagctataaacattacaaaggcacttaaagaaaagctgtgctgggaaatgccttatttgaagagcatttgggtacactcacatgaagctttggaaagttacttaatcttcctctaagcctcaatttcttcatcaataaaatgatgaatatatttcatatttcataagatgtaggcttaaatgaaatcatgcatgtgaaaagcacaatgtctattatgcattaagtgttaaacacaaactttcaaacttttacatttcagtcatttaaatcaaatgatctaccatagcagatctccccaaagacactctagctccaaactaactataatcaatcccgtggtgacgacccaaagaaccagggttcctgggttttctctcacgcccagcccacctaggcttctgactgcctatctcctcatcttagagggattcctcctgaccagtcattacaaaaattcttggagcatgagcaagactgagtctgtgtttggattggaggaaggggtaagtaacaaggtatatatatgtatatgtgtgtgtgtgtgtgtgtgtgtgtgtgtgtgtgtgtgcgcgcgcgtttgtgtttaagttacaaactaaggatggttttaaaaaattgcaaaatgttaagagatttatctaggatctgacccacttccccagaaatttacggaattcaagaccaagcctttcgtattcactgtcatcagttagatggacccagtagctaaaaaattaaggagaaaaaaaatagaggaatatgagggaaaaagtcaagtcagaggactgaagaatatatacagaacatagaatattagaaattttctgaaaatagatgatagcaaatacctcaagaaagtgaggaaacgtgaaaagggagcttaaagaaaaataatagagtccatacatgggacacaagcacaaaaagctgactgagcatgtggttctctactaataataactggaaaacagtgaaaccagcaggaaaaacttgcacataagagtttaactttccactttgggtttcaaattctcccatagcaataagagtaagtgaaataatgttcacataaggattttttttttttctattactgtagtgttttgttttgttttgttttggttttggtttttggtggtttttttttttttgagacaaagtctcgctcttgtcccccagtctggagtgcaatgtcatgatcttggctcactgcaacctccgcctcccgggttcaagtgattctcctgcctcagcctcccaagtggctgggattacaggtgcgtaccaccacgcccagctaattttttgtattttaagcagagacggggtttcaccatgttggccaggctggtctcgaactcctgacctcaggtgatccatccatctcagcctcccaaagtgctgggattacaggtgtgagccaccgcacccggcctgttactgtagtgttttaacaaatctaagtgtaatagtattagtcttcattcatctaagacatacaagtactggaattttttaggtgggttcctcaaatgtcatcacagtggtgtcttctctacattcagtcactcttccgcccttctctgtaatgctcagggatttcccagttcactagcacttaacatagtatgtccttacttactttggggtataaatgactgcaatagaagaagtgatatccttgagggatgaaacacgatcttgcatattcatatccctttcaaatgtttactgacttaatcacaccattagttttctaagtccaagtctaaaaacagaaatgagtttaaatacagtgaacatttcattttcactataccactaagctgaaagaaatgatttttggtaaataaaagttcatcacagtgaaaagttctacatataactgaagatcaaaggattctcacctgggaagcttgtcaagatgcatgttcccaagctcccaggctcccactcccagagattctaatactgtaatggagctgaggacactacatttttaacaggctgaccaggtagttcagattcaggtggttcctaaaccaactctgaggaagtagtggttttatatacgatgctactgttgatgtggctactaggaatggtgctcagcagaaatcctgcaacatatggatctgtttacacactattcactgtgtaatgagagtctgcaacataggctaagtaataagagatgtcttgtggttgacctctctggagataagcagcaatgaaattccaatgaagtttcatcatctctcatcaccaaaaccatcctaaccacctcaataaaatacacctgacttcccccgctcccccgacccaccaccccaaaaccagctgccctatgttctaccaaaagctgcaaccaaccaatgacctgatactaaccccaatctatcagctgctgcctagtgcaacagagagggaaagtcaatgagaaggaattgggtgccagttcttgctttgcaaggagtgggttgactaatgagacagccacaaatgtcactgccatcccatctcaccctttcacctgtgctgcaaggcttcaacaatcatacccagtctccacttaggaaaattctgtcctttctcaaatgctggccactcagcaatgtgctcccttaatccaggccaagcacatagtaaaagaactccaaaaagggttacagccaaaagtgatctttctcctccatactcccaaagcagattatagctcctccataaacgtgcttcgcattgtgccccacgtttggtttgttacttgtgtatacattatcgtctcttctagattgagcttctgtaggaaaggagaatccttttcaattttttggtattacacccagctcaggaccttgctcagttgcttaaattgaatgagaaaatgtatctaagtacccactgatgttggaaattcaacttgttccaatattgaggactgcctatacctggcatatgcgtgtcccaatttgagaaattgtttttcaagttgacttgtatggattccttacagacgctcaagcatcagtttggttttccctaaatcctgcagatcaggaaggcagtatccatgtttgctttaagaaatttcattactataaatatatgaaatattataaatataaaaattcatatattataaatatatgaaattttgtctgcagaatttttttctcaacaggcaatcctgacataataaccaattttgagatgcttcaaaaataacactgcagtagtagccactcctaaaacaaaatatttcccctttccttcaatatatgtaatcacatatgacatataaaatctgcttattggataaatttatctttaaaagactatctatatttattaaaagttaaaatacatatactctttgacctggaatcaagtacaacaatgtattttacagagctaccagcacacgtgtggaattatatatgtacaaggctactaactgaagtattagtatagtaacaaaaattaaaaatcaaccataaatagggaataaataatggtacacctatgaatgaaatactaacttctaaaacacaaagtaaaaagaaagggaaaataaggaaaactggattaatccaacatatgacaggaaaggagaaaaaaataatgcaaagaaatgataatcacagtaaagtgaatacaaattaaaatttatctactaaaagacagtaattcaaagactagatttaaaaggaaaataagttttatgctatttacaaaagacagacttaaaacctaacaacataaaaatgctgaaagtaatataccaggtaaacactaaaaaaaaaaaaaaaaaaaaaaaaaactagtattaacaatagaacctgattttctaaaaaatagattaagaaaactagattaaaggagaaaatcattattaccgagatagagaggatcattacttaaatgataaaaagaagcaatttatcagcacgtttaaaaatcccaaaacagaatacacagtgctaacaaaatcatcttaaaataaaataagcaaatgctgatttagccataggagaaaccgccaaatccacaatcattttaggagaatgggtttaagaaaggaaaaaaaaaaaaaagatttctgtatgctcttaagagaaaatctaaaaaataatgacatgaaaaagttgaaaggaatggaaaaatatgtaccattaaaaggaaacccgacgtatgaatgccattatcagacaaaacagatttttttctttttgagatggagtctcactctgtggcccaggctggagtgcagtggcacaatctctgctcacagcaagctccgcctcccaggttcatgccattctcctgcctcagcctcccaagtagctgggactacaggcacccaccaccacaccaggctagtatttgtatttttagtagagacggggtttcatcgtgttagccaggatggtctcaatcttctgacctcgtgatctgcccacctcagcctcccaaagtgctgggattacaggcatgagccaccgcgcccagccagacaaaacagattttaagacaactaagaagttaacaagctgaccctacaataagcatgaaaattttgaaaaagaataggaaaggagaactcaccataagagaaattgaaacttgttataaagctatagttgttaaaacggtgttactacagtggtacatggacagataaatggaccaatgaagcagacccaggcactgaaaggaaccttttatatgacagcatggcacaatcagtaagaatagagaggaaataggccaggcacggtggctcacgcctgtaatcccagtactttgggaggccaaggcaggcagatcacctgaggtcaggagttcgagaccagcctggtcaacatggtgaaaccgcgtctctactaaaaatacaaaaattagctggtcgtggtggcaggcacctgtaatcccagctactcgggaggctgaggcaggagaatcacttgaacccggctagcggaggctgcagtgagccgagatcacgccattgcactccagcctaggcaacaagagtgaaactccatcacaaaaaaaaaagaaaaagagtagacaggaaataaatggtccagaataactgcctatccttgtggaggagagggtgattcaaaattaggtccctttcctcactctatatgcaaaaaacaaacttcaaataaattatacaattaaatgtgaaaatcaagactttaaaataaacaatgcagtaggctgctttataatatcaagttagggaaggctttcttaaatttcataaacataaatcatagaggaaaagatgaactgtctaccttaaaattaaagacgatataaacaaaattaaaaggtaagccagacaaaagaaatatttgtagtgacaacggtttaactttctttctttctttttttttttttgagacggaatctcactctgtcacccaggctggagtacactggtgcaatctcagctcactgcaacctccacctcccaggttcaagcgattcttgtgcctcagcctcccaagtagctgggatgacaggtacgcaccaccacacccagctaattttttgtatttttagcagagacggggtttcaccatgttggccaggctggtctcgaattcctgacctcaggtgatccatctgcctcagcctcccaaagtgctgggattacaggagtgagccactgcacctggcccacaagggtttcactttctaaaaatataaagaactggccaggtgcaatggctcacacttgtaatcctagcactttgggagggcaaggagagcagatcgctagaggccagaagctggagaacagcctggccaacatggtgaaaccccatctctactttaaaaatataaaaattagttgggtgtggtggcacttgcctataatcccagctacttggctactcaggaggccgaggcaggggaatcgcttgaatccagtaggcagaggctacagtgagccaagatcatgccactgcactacagcttgggcaacagagtgagacttggtctcaaaaaaaaaaaaaattatatatatatatcttatatatatacactattatatatatacacacacacacacacacacacacacacacacacacacacaattaatatgagatgcccaaaaatccaattgtaaaaaggggcaaaggttgtaaactggtaattcataaaaacaaatgaagagatgcttattggtactatatgctcagtattaagcaaattaaatgagataggatcgtgcatattcaaccaacaaaatatctgaatgtctgaaaataataaatgttaatgagggagtggagaaaatgggaatgctcatactgctgatagagagtaaactggtacaactattgtggcagccaattaatatttagtaaagctgaagatgcatggtccactgtggtacaggccctggagatattatcaaatgtgtacacaaagaaacacgcacaaggatattttctgcgatactgtaatactcaaaagccaatgacatcctcagtggtcatcaataagaaaatgaattaatgatgggattaatcatataatgaaatactatatagcagttgaaatgaatgtactctttacatgtatcaacatgctatacataaaaaacaatgatgagcaataaaagcaaattgcaaaaggatatatattatgaaaccaattatgtttagttttaaaacacagagaatactatggattgtagtaaaaaaaaatataaaatcatgaagagtaaggacaggtacaaacaggatagtggttcttcttgagaggaaggaaatgacataacaagaccttcaatggatgtgcagcttttcctttatttaaacacaaaaggatctgaaggaaataaggaaaaaggttgacagtggttacaattaaatagtggctgtatgtcaacactcttggttacaaacaacaggatctacactagctagtttaaacaaacagaataaaatggctcacaagtcacaggcgtggaggtcaggactacggagcccccaaaaatgcccatttttataccttggagcagctgcgggggaaaaactgctaagcaaagcctccacaccttgcaccattacatgggacctctgccactgctgccttgaaaaccacatcactgctccgttcaacaaaatgtatctcatactactcttgtctgcaaagtacttgcttccagatttcacacagttatgtctaattggtgagcccatgctacctgtctgagccacagctgcaaggaagggcaggagattaaatttcattcttctactgggtaaggcgagatccacagagtgggaagttgccaaaaagcaggtgttcaaacagtgctagctgcccaaaaagcacgaaaagtgcccactcaaacaagagttggtgaaaatattctctctacttttctgtatgctcaaatatttcacaatttttttaaagaaaaaatgtcgaagtatgtaaattcacaaacaacaaagggaatggaaaaaaaatcaataaacaagagacgtcaaccaaattctaaaagacaaaaagctaagtgactaataaaacactagagaatgtcaccacctagaaaacatgtggaggaagttccatcagaggcagccaaccggcccagctgggccttagctcagaggcagcaaaagttcatagatgatagaagacagtagagggattagttaaatctaaactaattaaaaagaaaggaattaattaaaggtctgtatacaaactggttgaacactaccccatcttcaaatatagaagggcctaaatccaggaagtgccccatgcaaaatattgaagggatctttattataaagtaagtgaaagaacagtctgggtaaaactaggatagtcaatttagaaatcggtagccaagacaagacctcttcattctagcattttaaaaaccctcatcctaccagccagatttacctacttatccttagtgatgcttatgagaagccaaaccttcctcaaaccacagagctgccactcaacctccctacatccacatcttcaactacaaactgacagccaacaaacgtaagacatttgaaaaaagcctgaaacatgtagatgaaagactaagaaaaaaatctgtcactggagaaaagagatgattcagggactagaaagtgaatgaagaaatgaataaaaattatattgatatcttcagagagcttcatgaaaatacttcacatccagaaaacatgaaaaggattctatgaaacagaagcaaaagagagctttcagaaattaaaatatgcttgacataatgtgagtaaaatataaatgcaggaaaaataatagagaaagggaaaaaaatacagaggaccaatacagacgatgcaaatacagctgaaaggtattagagaaacaaagaacctccagagaaaagaaagaacaaataaagtaaaaaaacataaaagagagatgtcaaaaattgaaaggatcgcctacgtaccaagcagaataactgactgaagacctagatacaggtacaggattgtcgaattttacaacaccaagaataataagatcctaagtgtccagagtgtgttgagagaaggggatgcagagaacaggttatataaaaaaggaacaagaatcagactggcatcagacctttcattagcaaaatcagatgccagaaaataactgagctgctttcaaagttctaagagaaaactacttttcaatctagaattctgtatctagctgaatagttcatcaaatgtaagcgcataacccactttagacatgcaatggctcacctcttagacattttttcctagaaaggagcttagagacaaatgctagcaaaatgagaaagttaatcaagaaacaggaagatatggactctaagaaaaagttgacctcacccagaaaaaaaaaaaaaaaaatacggccttcagaggaagcctgtgcacaagatgcagaaaacttgctgacaaagaagcagaaactttttggcaaaatatttttgtaagactgataaccaaggcttactcaaggtgtggggaaacaggcactcttagacagttattgggagtaacacttggcaaaacctttgggaagccagcatctggtagcacctgacagtaattccactgccagaaatctatttctacagaattatttatacgtgaggcaacatagagtagaacataagagcatgtgagtgaaactacctccgttcaaattcccactttaccactttcaagctctatgctgtttcctcatttaaaaaatagaaacatcttctcaacaggtcactatgaggattatagaaaaggttccacacgtgatgggcttcgcacaagacccagcacatgataaatactcagttaatattacttatctacaaacatttgccatttttgcacaaggatgtttactgtgccactgttcggcaaaaaacgcaagcaagtatagtatggtcctatttatgttttttagaaattacatttatatttgtatgtatctgcctagatctgtaggaaaaaatagagaaaacatgctaaagtgttgcatccatggagcaggaagggagtgacctgtttttgtacagtttttacttaagcaacatgaagtgtttcatactttagagaaaagaaaaagtaaagatcactatcaatcttggggagaaagggttaatctgtataagcacacacaaacattatatttaaaacatttattttattatacatatttaaattttagaaagttattaggtagatgtacattcctctgttgctttactttgatcttcagttacctgtaaaaacatgaatagctttactttcctaataaacactttcagttttacccttcacccaccattttaaatcattccacagccctcttataatgaccctttatctttccccttaaatagtagaatagaaagttaggtaagaagaaagatttaaaggccaagtaaccaatataaattatcaggtaaagaacaataattccattcaaaaatataatctaaggcatattatacctaggcttctcaagttggccattttacttttcagccgtaaaacaaaatcattagtgtaagaaaaaacacctgaagtgctgtaacaagctattttaaatcagtttattttcttttggagtataattccatttagaatagaacatattacagatttagtctaaatagatatctctatgtccctatttctattctgtgtcactcagactcatcaaacagacatggctaaatctgaattcaacaccccaaaacctgtcctacctgcatcatctatcttggtaaagggctccacccagatacctaaggacagcattcaagaattcactctcttcttcctacctgcatattccatcaacagtcctactaattcagcctaagttaactctcacagtcattctccctatcgcggctgaactttaggacctcattctcttctatccccctaacagaactcttggcttaagtcacagctatatcccatgctacccctagaatgagcttttaaacaagaatagctgatcaacaggtcacttccctactcaaaattctccagttactctctagcatctcagtggggtggaggaggaaagtcaggaatgcaagttccacaacacgggacacaagcccctcatattctgtttttggactgactctttacctatcctacatgtgacctgtacattcaaattcatcttacattcatcatgttctctatgtaggcaagtgacttcctctgagataacctccaacccattttccaacagattatctgcatggtccacttttattcaccctttaaaatcagcttaagagactccaattcctggaagccttccttaagcaactccccagcttggtctgagtcctcttctttatgccagagccccacatgtacacctgaactgtctgcttataagtctaattatccaatcaacattacttccctgaggcagcaagtaaattttgtgcatttttttgtacctccagaccataacagtacctggcacacaataaacaatcagtaagtctgtgttgcatcaatgaaccacgtttaatctaatcccttcagaaaagcaaaatggacagtagaaaaaagcaactaaaccagaataaatgtttgaaaaaatatgtattgactaacatcactagatattctaggtaagacactgtctctgccgtttttctacatttttcattcctttaaagtgttcagttactactgcttctttaattttccaaactatttctttaatattctttagctttttaaattttttttaattttacttaactccaagtaaacatgctgaacattttttctttagtttcttcatctaaaatgatcactgtgaccaactaaaaagagaaaattactccatccattcaaaggtaatttcttctcatgagaaaaaaaattatataacccttactcaagaacattatggtgaagtccctaaacaataattcctatctacatagtcattaataaagactaggtttatatatcattatgaaaaattgtcaataaatatttcttgggtaaccccttcatgtgctaatgttgtgttcaaaatttgggcttacacaaatataacaaatcctgaaaggcttaacagacagaaaataaatgtactggcaaagaaaacaatcaaaaaatagtatgtggacatatacaatcaagcacaaacttatatgaataattatttgttagagattactctgagactgttccatggaggaggtacgactcaggcgaggtagtgaagaatgactgcgtagtaaatagaaggagaatgggaaatggagtctagaaagaaaaactatcatgaagaaataagcaaacttgaaaataagtttaatgtgtgatgcttaatgtgcctgcaagcttaaccagtgtttgtggcattgtgggaaattaggataaggaggaagtcctaatgaggacagattacacaggacagctatcagataacctaagtaaaagaggcacacttagcctatgaaataggaaacaggaatagttgtggtcaagaaatacaatcacccgggccgggcgcggtggctcacgcctgtaatcccagcaccttgggaggctgaggggggtggatcacgaggtcaggagatcgagaccatcctggctaacacggtaaaaccctgtctctactaaaaatacaaaaaaattagttggacgtagtggtgggcacccatagtcccagctacttgggaggctgaggcacgagaatcgcttgagcccgggaggtggaggttgcagtgagctgagatcgcgccactgcactccagcctgggagacagaacaagactctgtctcaaaaaaaaaaagaaaagaaatactatcattcctactcattaagtctaaatgctaatgacaaagaataaactacaaaaacacaaacattcaaatctggtttttcaggacattaggatatttgcacatttactgttaatggctaaaggcggctttaaaatacacctgacaaatcttaatcctctaaatattcattaagtttacaaaataaatcctaagacctaactgataccattacaactattaagaactattactattacatagtaatattcttatttctcttcaagttctacaatatcattttcacgatattaacaaataaaatcaaaagagaactgccaagttacaactttacccttaccaacacactagtgaacaatcacaacactgctttgactattgagacaacttacttttttcctttctctttgtttctttcatttttcccccctttggttgttattggttaattttgatgaatttctttatagaagagtactcaatagctgtcaaaaacacttaccattttccgagatctttccaatagcttatcccatattgtaaaatgtgccttgaaaagaaaagatttgcgatgaactaaatgaagcagtaatgtcaaagtaaaaaggacagagtctttatatagcttttagaacaaaataaataaaaagctaggcagtactaatttagataagtggttataaaagtggatcatagtagcaaaaaaaggtgctacatggggatagctgcttttttgctttcttcaatcgcatgaacccgggaggcagaggttgcagtgagcatttaagaaaaaaacgcttaaggattgaacgtgcccttctttcacttttgcccatcttaatcatttccatcatagaaagcatttcttctaataggaagcaaaaatctgccctactttcccatagactgtggttcaatccttaaacagccagtttcaacattctagaagtcattcttcaaatcataagcaatcacaagaagacagtcattaaaaaccaactgtgacatcttcacactgaaatggcagaagcagaggattcatcaagttaccctaaagaataagtaaaacctaacaaagacaatagtaaattttttttttttttgaaatggagtttcactctgtcgcccaggctggagtgcagtggtgcgatctcagctcactgcaacctccgcctcccaggttcaagcaattctcctgcctcagcctcccaagacaatagtaaaatttaaactcaatttccttagtccataacaacctcctgtagcagaggattatcagaatgcattaaagaaaactgtgcaaagtgtatcatgaccacatcaattttattaggtcaactgaaagtggtaacaagacatatgggcaggccagtgactactccacactgaatgagctcataaaatctataataaaaggtaaaattaataaatatcaacatacaaacccttccagggaaagagctgactggtatgtttaaagggaaaaccatgcctgactcaggcggaatgaactgctggtgcagagaccttaagctgtggctggaatatagtgagtgaggaaaggagtggtgttagataaagtcagagaagcaggcagggaccagataatgcagggctttgtgagacagggtaaagagttgggatttgttcaagggaagccattggaaagtttggggcagaggaagtacataacagattgtgtattaaaaagatcactttggctactaagtggaaaatgcactgtagatggcaagagtgaaagcaaggaaggtgagtgaaaacaaagaggaacttggataagggaagtagtagtagatgagatgttataaggtgcatagattcagaatatgtttcagagttaaaagttgaaaggacttgcggatggatgggctggggcatggctatgaggggaaaagagaatcaaggattaccttaaacaactaaggaaaccaggggtatccaatcttttggcttccctgggccacactggaagaagaattgtcctggaccacacataaaatatactaacgctaatgacagctaatgagctaaaaaaaaaaaaaaatcgcaagaaaacctcataatgttttaagaaagtttacaaatttgtgtctcattcaaagccgtcctggactgcatgcagcccatgggctgtgagttggacaagcttgagttaaaggatgatcccattttctgaaattgggaaggctaggaaaggaagcaggtatgtggagaaaagtcaaagtcaaatgtataggagaggtgtgctaaattttacaaaatgagagggatgaaagaagatataaataaataagaagatacagtaagttcatagactggaaacctcaacatattaaagatgtcaattctccccaaactgctatacaggtctaatggacttatcagaatctcaggaagactctgttgacattgaaaatattatcctaacattaaatggaaactcaaagagactagaagagttaaaacaattttgattaaaaaacagtaacaagggaggaattactctacctgatttcacagcctatttagagctacagtaatcaagactgggtggtactggtagagagctaaacatatgtgatcaatggaacagaatagaggacccaaaaataggcctacataaatatgctcagctaatttttaacaaagatgcaaaagtaactcagtggaggaagagtggccttttcaacgaatggtgttggagcaatctgacatctatagcccacaaaaaaaaaaaaaaaaaaaaaaaacctaaacctaaatctcacactcatagaaaaattaactcaaaatggaccacagatttaaacaaatgtaaaactctaaaacttttaggagggaaaaaaaaaaggagaaaatctttgggatgtaggactggtcaaagagttcttagaattaaccccaaaaacataatctataaaaacaaaaatgttatcaaattttaataaactagtttcatcaaaattaaaaacttctctgcaaaaggctgctcagagaatgagaaaacaagccacatatacaaacacaaggtacagacagaaaaagagagaaatctgaaaactacatatctaacaaaaaactagtatctacaacatataaagaactctcaaaactcaactgttaaaaagtaaaacaatctaattagaacactagcaaaagacataaacagacattgcaccaatgaagatatacagatggcaaataagtacatgaaaaaatgatcaataccattggtcaacagagaaattcaaattaaaactacaatgagaaatcactacaaacatatcagaatgactaaaacaaaaaaaaaagtagtgacagcatcaaatgctagtgaggatgtggaaaaactgatcactcacacattgccagtgggaatgtaaaatggtaccgtcactctggaacactttggttgtttcttaaaaaactaaacatacacttatcatatgacccagcaattgcactcctgggtatttatcccagagaaatattcacaaaaacctgcacacaatgtcacagcagctttatttgtaatagccaaagactgaaaataactcagatgtcctttgatggatgaatggttaaacaaaccatgatacatccagaccaagtaatactacttagcaataagaatgaatgaactactgatatactcaatgtactcggatgaaatctccagagaattatactgagtgaaaagtgccaatcccaaaaaattacataccgtttgatcccattcatacaatattcttgaagtgacaaaattatagaaaaggaaaacagataagtagttggcaggggtaagcaggcagggtaatgggggcaacagagggaagtggctgtaaatgcgtgtgtctataaaaggccaacatgagggatccccgtagtgaaggaattgtcctgtatcttcattgtatcgctgtccataccctggtggtgatactgtattttagtactgcaagatgctaccattgaggaaaccaagtaaaggtacatgggatctctctatgtcttataacccaattatctcaaaatcaaaaatttaaataaaaagattagcaaggggtgggagcaatgtggaaaatgtcaggcttcgggtcatgatggatcattaaaattagagggaagagcatgccaaatttaagcttaaaaggcattccaggaagtcttaccaatacgcactctaataccccctctgtcaatgtaccctcacctatgctaacttgaaatttttaaatgctatgtcaatttaattttttcaactaatgtttcttttgtaattgtatatttacaccctgggcaactttgtttttaatcataaacctgagtttataaaatattagtgtcacataacttaagaaaaattaaaagtttatattcttcaaactggtataaaatcaagtccggaattatatctatacccaaattggaagacctagaactttaagctttacttactcttaagtgaacaggtaaagacacgccctggaatcttcgtatgagacttggctgggtgggttgaagattgtgaactgctgatacttcatactggaaacaaatacttgttcttggaataagagggccctcactcacatcaatgaagtcacctattctgattgatttaaaaataaataaacaaaactgcaacatcaaataatttgtaagagcttgaaaaagaaatctcttccttctctttgctgctaacatccctaatcaagaacattatatatggttcaattcagtttctaatgacccctgacataatgatctcaagtaaagaggctaaaactttgaaaattaaatcaaatgaaccattttcttaattagcattgatataggttttaaggtctttaagagtcacgcaacacatcatgctatcaagctgatccaattgcctaaaaccgatcatctacaaccttacaataacccatgtaacgaagctgagaattcagtgtgtaggacagattgtgttcagaaacaaagggcagtttctagaggaaaaaagtgaagtccaattcataaaaacaggaggctgagaaaatggatccaggtcatgaagtcatttctgcagaatgcattgtcttgggacttgctccccatgggagaacgtcatcataagcagtggacctttctcatccatgcttgagaaagcacattctggcttaacttacatgtatcttaagtaattactagttagtcagtattcatatgaattacgatgttcaattcatcacaatgactatcttgcccagtttcaaaacacctaaaaattacattcttaaacagtggttttcaactcaaaattaaataaaaatagcaaacaataaaatgaggattatagaaaccacaagtgttcctgaagataatttaaagcttccatttaccaccataacaaaacaatgaacgaagcaaccaaaaataaggtaataagaacaaaataagacacaaattcatcttttttggtcatatgcttcattcagataacaataaagctaagccttactctaacatagcagccagtttttagacttttacttacctgtgtagcttgactattctctcagggttctgagatgccttctcttctatgaaatctactttgtacctgaaaagcagcaaagaaaaaaacatttttttaactcaaaatatgtaaaaaggtgtttaaagatacctccctttctcttcctcttcagccatactttctgagagtaggttacacttggaacctccctttaatctggccacagccccatgactctgccaaactgttctcaacaaagtcacagacctgcttggtgtcaacccagtggacattttttggtcctcattttcttaataccaatgctcacctccacttctcaatgtgttctttctttccatttttatttctttgttcttttttttttttttttttttgaggcagggtcttactcttatcacccaccctggaatgcagtggcataattatagctcactgcagtctcaaacttcgggctcaagcgaccctcctgcctcagccacccaagtagctgggactacaggtgtgagccaccatgccgggctaactttttttggtaaagatagggtcttgccatgttgctcaggctggtctcaaactcctggtgtcaagcaatcctcctgcctcagtctcccaaaatgctgggattatagcgatgaaccaccacatccagcctcaaagtgctctttccatgggtatcagtggcattccttactgcttgttattttacatctctggccactcctgtctttctctaccctttgagaattctatcctacaccctcttttcacgctaagcatcctccctaggtcagccccttgagctacaacttatgtagttgtatgtcctatatctctgcttctaatctacctacctcttctgaccaccaaactgtatatccaagacccatttggacatcctctaggatgttccacaagcaccttaccctgaaatttgcaaactgcacaaattaccacctctttccccgcccaaacttgttcttcctcctgaatttcctgtcttagtacgataccaccaaccacccaggtgtccatgtgaaaaacctgggagatttccttgattcctttctcctaccatatctcctttattcaattcattatcaagttgtcaatttgactgcccagtatctctcaaatctacccaattctgtcagtatagctaaaggcacagatgaaactgcacagcccaggttcaaaccatgactttaccatttactattgagagctttgtctgtttacctcagggtgctaaacaagtaatatgtgtaggtgcaccacaggtgtatgcacaattatgtggcaaagttagggaacactggtttatgcaaaaacacccactgactgctacagtcccccaggcactaataagggtgccaattcccttgaatacttatccctcctgacccacctccaagagatgctcctgtcccctgagagtcaaagccacaaaaaggtcccacccttactcctgcagcagaaggactcaatcactgacccaccttcaatgaaccaactcttttgtcctatcaagcttcctccagaattatccccttcctcctaccacacactcaactaagttacaaaagtcccagaagccgctaccagtccttgacagttagaggaatgggaaatctcaatgtgtactgaatggaagtcaaaagtacactgtccagtaaagtaccatggtgcacttaaatgtgattagtactagttaaaatgtgccttaagtgtaaaacacataccaggttctgaagatttagtgaaaaagaatataaaataacatcaatattttaatattgattacactgagtaacattttagatgtatcatttaaataaaatcattaaaattaacttcaacttttgttttgactttttttcaatgcaactacagaaaatttcaaattatacagatgtctcatattatatttcttttgggcagcatgtgcctagacttttgtcacagagagtgacttcacgtgttcagatagtccaaagaattttcttgtcgaatcaatgctataaatggtggtttggttctacaatactatctgtactctagttaaaacagtacattacaactggtttctaaatccactggttccaggacacgctaaaaatgtttcaagaaaaagtgtttcatgggcaaatatatttgggaaattttcaatgtccactttgggagaccgttgagtgcgatgagtaaaaattttttttttttttttgagacggagtctcgctctttcgcccaggccggactgcagtggcgccacctaggctcactgcaagctccgcctcccgggttcacgccattctcctgcctcagcctcctgagtagctgggactacaggcgcccgccaccacgcccagctaattttttgtatttttaaaagagacggggtttcaccgtgttagccaagatggtctcgatctcctgacctcgtgatctgcccgcctcggcctcccaaagtgctgggattacaggcgtgagccaccgcgcccagccgagtaaaattttttaagccactgttcttcaaactcagcttaacacagtacatggtttcacatgtcaattaacatcctatagaagaatactataagacagactgctttgagaaatgccaagctataaagtatgtgtcaaaaacacactcataacccaatatatttacgataacctatccctatgagaatttgtaattcaacttctatatacctaaagaaattctaatcagtaaactttcacaattcttaggtgcatattttggcttcagactctgttatttttttttttttacagcacaggtttctctttctagttagttctaatattgtattagattaatgttaaaatttagctcatgttcttacaactggtagtagaaggtgaactgaaagttttctgagaactgagaagccaggcaggaattaaaatgttaaagaaaatccatcaaatgaataattcacatgcagaagattaagacctggctgtgtaaacattttacttcagctgtcagccccctcccaaactgcttgcattttcaatcttatcagtgtcattttaagtgtggaggggtaggagagaaacactgccaaatacacacaattatatagtcgcttaacgtacattatcacttcacactagaaagaaaaaagggaaacatgccactatgttgatataatgagaaaggctggtccaagaacagagaagtaaaacaaagtgagaaaattatcaagggacatgggtaacattttcctcagcgaaataaatgagatcacagaggtctcagactggaaaataatacactgtcacatgtatatcaaatataaaaatttttaagacctgaattttctttattacatataatactgggagagttagccttgatttaaagaaagccaacacttacttgctgtgttgaaatatttccaatgccacttttgcttcaacttccagagtttcaaatggaagatctttataaattaaagcatgagcatcttttgtgaaggaacgtaagttctccttaaaaatgaaagtaataacctttagtaacaattcactgaaaagcatttctccataagccagttgaaacaaaactctatgcttagtactgcaaatccaactaaaataaaagataaaatcaaatttgttagaacagaaagttactaatttgcaacaactgaagttttggaccataaactataaaacttcttatttacctgtaattaaggtgtcagccttcattaatactaattattaaagagaaaactatacagaaattttatccaaattatataatttcatccaaattatacaaccttaaaatgtttattaaaactatgatgcagcaagtaaaaatgccaataaataaatagcaagacataaaaatgtgtttacagtatgaataaatctaagtttattaaatatatggggaaaaattattgttttcttaattaagaaagtttcactagaaatgtagcatcatcacccaccctgtgcaaagtatagcatgtccaatattaaaagtttctgcttaataaaaatgtcaattttacacaattaaaatgatgaagaatacacattaacaatgtgtttaagatttttaataaaaattctaattgagctttcatactgtaaatcattactaataacacagaaaaaaccaagcactattacacaagtaatttttataatgaaattatttccataaaaatcctattagacttttttgcatgaaatgacttctctataaagaataatttactgtataaaaaaatcaacattcatggtttaatacaactattccttcaatgtaactctaccctactttctttaagctgtctactcaacccaactccatggagtctgcaatcagctcacatatttcttttgtaaggttttatcttttaaaaaagaaaaatgcaaaagccaagcacagtggcatacacctgcagtcccagctactagaaaggctgaggcaggaagattgcttgggcccagaagttcaaggccagcctaggcaacatagtgagacccccatctctttaaaaaaaaaaaaaaagagagagaaagaaagaaaaaagcagttatgtttcacagataatgaaaattaaatcttgacctcagtttttacctaacttgccccagtaaaaaaaatcttaaatttggagacatacttgaaaaggaagaagctacactgacaggagcccagaggtcatgaagaaacagttccaatcccttccctcccctctttccatcctcttctctctctcttccctctccctttttctcattctttcttgattccctcttctctccctctcaatattatgtaatatgcgcaggattatacaaaaagtaatttccaaggccaaatttaaagctggatctgcccttactccaaaatccttgcttttaagaaccactacagtattttactaaatctaagatgtattactaaggggaaaaaaaaaaaaaaaaaacactacaaattctaattgcaagataccatctaatataaggcttatatattttcagagatattaaatataaaaagaatgtacacagtggaaatgataaaatgatgtgctacactgcttccccttttcagatctccagactcccaatacataggacatatagttttgtttaattaagaattaggtatttgcctattctccccaatcagaactacatctccaggcttgatctttgataaccatcagcaccccttacctactgagcacctgatctagactgtccttgttaggctctgttgctacccaagtcccagaccaacaaggaccatcctcattacaaaggcaaaccattcacaaagagtttagtttgttaatatttcatttgttgatgcttgagtattagctttgtcaaagtctgattctttaattcacccagctctcaatgtgacccttgtatatacagggacctcactgtatgcaacaagttaaaatggtttaggggagtggttttcaaattgtgctccagcgacccaaacaagtatggctccaggccccctactaccacatgggtcaagatagttaagtttttatattttatatcctgggcctcttgaaaaccactaccttaaaaccacttagaaggaacatcaagaaaaggtcaagcagaacataaagtttcaagacaactgaccatgttgatgtaaatactctcattcacatccctctgtcttaaataggctgaaaaagcaacaacaccaatagatagatagatagacagacagacagatacatagatacatagatagatacatagattcttttaaatgttctcaacatgcagtaccattcaacaatactaacataggaatcattctaacaaagaaaggcagacactctaaaattaatactccagaagaatacacttacttttgttggcatccactcatcaagtttgctatccaaaactacgtcataacagaaggcaccagaaattactgtaaatccaaccaaaataaaaagcaaagtcaaatctgccccaacagaaagttactaatttgcaacaactgaatatttagaccataaaaaggattagcactctctcccaactctacaaattataaaatggttgccattcttccagctgcttgccagagctctatcaaatttcccttagccaaaagattgtcaaccccaaatcacaaatattttttaaacattcaagttttcttcacaaatgctattgccatacagatttcatacagttaccagatgtaaaaattctgggaagccaaggcaggtggatcacctgaggtcaagaatttgagaccagcctggccaacatagtaaaaccccatctctaccagaaatataaaaattagccgggcttggtggcaggcaactgtaatcccagctacttgggagtctgaggcagaagaatcgcttgaatctgggaggtgcaggttgcagtgagccaagatcgcgccactgcactccagccttggcaacacagcgagactccgtcttaaaaaaaaaaaaaaaaaaaaaattccaaaagaacaagatatttagtaagtagataaataacttaatggatacaaaatgttacatttcttttatatcccctaaatatcttctttttggggttttgttcttagaatcatttcttgagcttctttcaaatattttaggtatatctacttctttaaaaaaaaaaaaaaatttgacacgtgatcctaccatacttactattccaaaatcctagttttagcaaaattacagtccacaccctgtcatttcaccaaagtgctgtcactttccaaagtaatggtcctgtctggtgaaatattaccacctaagcacagctctttacagtagtctacttatactcagatttcctcctcctctatacatccaatttggaaatatatgcttaaagtaaaaaataaacgctaagggccgggcacggtggctcacgcctgtaatcccagcactttgggaggccgaggcaggcagatcacgaggtcaggagatcgagaccatcctagctaacatggtgaaaccccgtctctactaaaaatacagaaaaattagccaggcgtggtggcgcgcgcctgtagacccagctaatcgggagggtgaggcgggagaatggtgtgaaccccagaggcggagcttgcagtgagccaagatcacgccactgcactccagcctgggtgacagagtgaaactccgtctcaaataaataaataaacgctgagatagtggaattccatgaaattcatattcaagacaaacactttccagtaattctatgatgttaattattaacctgcaaagactacttcatgtttcatcatagtaagaaagattttgttacccatgataaatgacacatatgtataatggtaatttatattagtactaaactctatacgtcatcaaaaataggtaccaaaatatttaaggatcacaaaaagacatatatgtatacactaccaggaacttctggagctctgaccaaattgaccatatattcatctttgaatgccctctctatcacacagcccatcatcatagcacaggaacgccaatatgcctagaaaaaaaatatacatatataaaatatatataaacacactgagattcactaaagttttgacaatattaaattttaagtgaacttctgacttagaaaatatttctcatatatctctgttcacacaatgtagcaacagttgccatcaggccatgacgttacctcgaccaagcaaaaatcaaaaaagaatgaagcatgaacctcaggttcttagcaatgtttctgtgcaagatttcaaacaccataatggttatcaaccccgacagatagttttattacctgaaagtatttatttttaacccacgataaagttaacttgttaacaaacttgtgctaaagtaaaataaatatattaattatgtaactttgtatcatttataaatatggagaaaaactcaacttttatgaattattagtgactcttatcctctacctaacaccctaacacatcgttcagattactcatatttatagcagagcagcaggaactgggctttcatcttaccagcacattttgattcatggacatgcctgatatggtatcagagcaatgacctgatcagtcacaaggagaaacctgcaccatacctgtccattgtgttcccctcctgctgacactactctgtgcacttttcagaagctcttcttaacatctgaggactacaaaagtgggatcacttctccattataaattcaatgcaaccatattacactaaaaataagtacagacccaggccttgaaggcaagtagcaacatgtacttcttcatctatcctacctaaatgtctctaaatgtctgttgaactccagtcagaatgcctaggttcaaatctgggctccactatttcctaaatcagtaaccttggtcaagctgctgaacttctctttgtctcagtttattcatcgggaaaatggggagaatagcacgaactcacagagtttgtatgaaggttaaatgagttaatatctgtaaatcacctagaacagtgcctgatacataatacatacatactcattgttggctattactgtcatttctatcattttcttgttcaactatttcaacaaatatttattaaacacctactgtatgtatatcaagaactaggtccaataagggaaatggtccctatcttcacattcgaccgtttatgttacaagacaaaattaaaatatcatatctagagactagccaagttgtgtgagaccttagagaaaagaggattaattttgacaaggagaaacttagaagtttccacaaagcagatggccttttaattgaattgtaaaagataaataggattttaatagagagaaaagaaaatgctcacatttggcgaaagcatcaacaaaagcaaggtggataacacagcataaaccattagtgactgatatggtttagccctgtgttcccacccaaatctcatctcgaacgaaggagagacctggtagaaggtgactggataatggggcggtttcccccaggctgttctcttgatagtgagttgagttctcatgagatctaatggtttaaaggtgtttagcagttcttccctcactctctctcttgcctccatgtaagatgttcctgcttccccttctactatgattgttaagtttcctgaagcctctccagccatgaaaaattgagtcaattaaacttcttttctttataaattacccagtctcagggagttctttatagccgtgtgaaaacggactaatacagtgaccaagtactctaaagaggccagagcaaggaggaagtggaaagaagcaggggggaggccaagctggaaaggcaggctgggaacagattatacagggcctggaaagctatgtgaatgttaacaggtaggcaagttctttaggtttaagtgacatgatccttggacaagtcacttaataaagctgttatatgcctgtaaaagaacaacttttaagtaacgaaaaaaaatagtggggggatgggtaagcagaaagagttaaaaagttattgaaatcatctagataagatggtcaaaggctgaattcaagcagtagcagtggaaatggaatcacccacaatatagagagtgattaatgaatgtaagttgaacaaagatatgaatataaaagacatagcatacaaaaatacccacaaatggatgccactgataagttctgaactacaaaagtgcctaatctaacaggtaaaacattgactaaagagtacgatacaacatttgaacttggccatatttttacattacaccccatagaaaacaggtcttaataaaaaggtgaagatactggggaaatagaaaaagaatgtagagatagaaataccttattcacttctcctggatcacaatctttgaaagtaagaaatttaatttcacaggactttgttaaaggcttatacatgtcccaaggctgtccatccaccagagccagaatggacttcctgcaataccactcgcttaaatctagaaatttaaaacagactgattatctaacaaaatccagagtgaaaagttacatgtttaagtgctatatttagaaatataacaatggaaaggcaagattctgcagactgtcctttttagagaaaaaaagtatattacgtctataatcaattaaaaaaaaaaaccctacaaaaattagccaggtgtgggggcacgtgcctgtaatcccagttatttgggaggctgaaacaggagaatcgcttgaaccaagatggcagaggttgcagtgagccgagatcacgccactgcattcgagcctgggtgacagagcgagactctgtctcaaaaataaataaataaataaaataatacccaatatactcaaggtcttattggttattaacaaaattacccaaaccatttacaaaatttgttcaggctacatctagtttgaaattaatttgctaattattaatgaaaaaagttacacttgaatattcagagagcagcatcatggatacatttggatagatacacacacaactcaaagtaaaagggaaatatattaatacacacctacaaaaatcagttctagattggttttgggtcttgctcccaaaccatctcttatttccatgacatagatgcttcaagttaaatacagtagttaccattttttaataattaatattaactcccggataagccaatcagctctggtctgtttcatcatcccagaatgcaatgccaactgttaatgccaattagatgttctgcaattacacagctactcacaaaagtagtcaaactacaaggtctaaattatcaaccactacataaaccccgtaaagtcagggatcatgtctacttttgctcactcatcagtatatccagagtctagcaccaggcctggaatatagcaggtgttcaataacagtttactgaatgactgcaagcatgaatgacaagaacgtctcattgcaggggtcatgctgaggatgcttcagaagcttcatcactacatgtgatgtgtataaagctccttaagggcctgagttttgtcttatcctcctctgtagtcctaatgcctatcatatcgcagaggttccagaaatacttgaaaaccaaatgagtaaatatttataagtactaattcaaatgccagagtgaaggaagattaagagtgagtgtagactctctaggccagtttaagctgataactaaagttgttaattacttaaatggaatggttactgagttttccaaaagtttaagcaatgcagctagtcatgcctgtatctgttttggggcttctttaatttaaatattaccagttctatcaaacgtactatcaaaacattttgatcaaaaataaaatatagaagttcttattcccttcatttccacacaaaatcacacatggggcacagttgtctcctttaagatatacataaatacttttaccccaatcacattcaccccatgcacattcccactcacacatttaccacatgtacatctaaatgtcaacaaaaatacaacacagagagagccaagtggaaagcagatgatagattaagttaggctatacaatgaagaggggagaaagaaaaaggcggcaaaaaaaagctgatcatctgaggccatggcaatccctttacaccaaaatcctttcttgagacctgcacggtgactcctcccaccacatcacagccctagctaaaaggagcaagcaaattccagctacttgggaggctgaagcaggaggagagcttgaggtcagaagttcaagaccagcctgggcaccacagccaccctctctctcaaaaataaaaataaattagccaggtgtgatggtgggcacctgtagtcccagctacttcgtaggctgaggctaggagtttcagtgagctatgatagtaccactacactccagcctgggagcagggccagaccctcatctctaaaattaaattaaattaaaggagaaagcacactagtaacaatgcactcaggtctggtcaccttctgccagaaaattatctagtaccataaacaaagccagattcaaacaagcgccaggcaggacaatctgtgcactacagtgccaaccttgcaatactcagagtaccctccagaactacagggacagtgaatagacaataaggtgccagataaagaacctctgggaagtccagggacttctgcgcccaccacatctggctaatttatttctatttttattttttgagagacagggtggctatggtgcccaggctggtcttgaacttctggcctcaagctatcctcctgcttcagcctcccaagtagctgggatttgcttgctctttttagctaggtctgtgatgtggtgggagcagtcaccatgcaggtctcaagaaaggattttggtataaagggattgccatggccacagatgaccagaagtaattacagcatcctgtctcctgcaccagtgcttccacacagcttaagtaaaagggtcaaaactgtaacctgattctgctacttacgcatggcacaactgtagggagttgaaatgtttttattcatcacgaagacagtaccggggtcagttttcccaacatgcttaacttctatcttctcagttcggggagttaatgataactgcctggctttctctttattaaagagatcattccgcatttctgtcaattctgtcggtgacagctgagaagctgacgatgttgctataaatcctgtggagaagttacaataaatatgaagactgaaaaaatgattaacgtactgccaaaagtgcgctcagaggtaaaattaaaccaatttgtaatattaacaaacaccagcggaagaaacagagctggcccagatacgtgcctctacttttaaatttggctctttcacatcagatcgctatttcccaccaatttcctgtgtcgtgtttccaatcagtgctttacaataaggggcaaaaagtaaccaggaaacggagtcaaaactggactagagtcattgggaaggtgaacaaagtggtcggtttgacagggtctgaagaaaaacaagaaaatttcaggaaaccaaaggtcccacaccgaaactatcaatatccagaatgagaaatgctgagtttatatcccaaaggccaaatcagggaacctgccaaggcaagtacgagtattccttgggaagacatggacagatgtgcacggaacgtgcgctgcttcccagaggcgggcccaagctcctcccgcggcctggctccgacccctggccccgacccctgcccttgcccctgccctccgccagaccctcgttcccataaattagtcctcccaagctgtgcaagagcgaccgccgcggagggactaagaaaccctcctccttcctctgccccgcgggacctccccggccccgcctcagacccaatctagacagacaccactatctaggcctcgctccctgtccctacggcctctgaaactcactccatttgatcccgccaccgggtgcgaccagccagagccgcagcgcccgggaacccatggccagcgcctccatagcagcggtgagaaccgtcgcgcgcaagtccttctccgccctcctcccccggaaaccgaacgcgcactcggagttccgcaggacaggtctgttccggacccagcactcagactgctcgcctccaccggggggcgtcaggcctcgctggggattcagtggctgagaccccgagactcggagccggggcgcgttacctgtgctcgatacctgggcgcggtcacctacccagaggtgcagggcccccagggcggtcggcctgccgcccaccacgtaggctctgcagggaaacagagttccacaggcgtcgttgccctccgccttcagccctccgcgggttcgatcccggccacccaggtgaagcgcttgcttccctaaaagaatatatggttttcttggcgggggcgggggtgggggggaatggggaaggcgtcttctattttgtcagcgatgacatcctctagcgcgtggcttaactttcaattgtgccgggtaggttcttagttcggctggagtgggtctgcaccccggttctccccttagctgtggtaatagaggcctcggaacacgtccccttgactttggagaggacgttgtaattcctaagagctctttacaaattttctagtttagtttatatagtataggatgtataggagaaggcatcccggggcagaatttttgtctctagttcactgatgtatcccaagcgcccagaacagagcacagcgcagtcagcgctcaacagatgtttcttgaatgaatgaatgaatgaatgcccttgcaggcaaacttcagctcattgtctaatttttctgtcctaccaggacgtgagtgttatttgaagtaagcactctgtaggtacaggatggaaatattttcatttacagtagtttaattctgtggctttacttaagggtgtcgaattcagcctttcccccactctgtcctttgccttgcaattggaatgcgccgccaccaggtggaagtgccgcctaaggtacaaatatgaccctgcgccacgatagatcgaccgtctccttggcccaaatgttacactcacaaccactgcgccaggaaagtgtaagtatcttcactttttaaaatgggaaatgtaagtgacggagcttggatttacatccagtctacattttaccaggctacatttcatttaagatcctaattcaaaccacgaaatgtacatatatacatatagtgttggagggcgggtgtatcttttgcttcctcaaatttgcatacagttcccatgaaagctgtctgtttcatcggccttttagagcctgtacccatttaaccttacctagaaacactctagtgcccttagaacatcttagagccacatttaagcaaagcctctgaacataaacttaagcaagtttgatcacaaacccattggaggcaggtaattggagttcaccggtatgagaaattaacctagttgaaaggttgtcactagtgataatggccaaaaaatactatgtgccaatcatagggcttggtttattaattttcacaacctacctgagcaattggcataataatcttcatattccaggaaaagaaattcaggttttaagagcttgagagacatacccgaggtaaatctttggccaagaattccccccaaatattttcttactctgaatcttctttatcttgccttctttatcaaccagctccccaaatcttagtctcactctgtcaatgtctctgccaaataaaaagtatcaagtctgtaacagtaaatatctaagataagcctggatcattactgtgccagaaagcctacaactaactataaaatacagacaaacagaaacatgttaaaaaggacggcggaccaagctcgaaggtcctcccgctgtccaaatttgggagagtttgcataacaaaaagaataatgctgaaatattatgacatgtatattaaaaattcatgaatccgtaatgacactcaagaataaatcagtgtagaaagagtgaagagagttttctgtacaaaagaatgccagataataaaagtcataggaataatagaatagggaaaatcaccattctgcatctaccaatgtaaccattggtacaggaagggatcgtcaatagatgctaaaatcagtagagaaagtttgttgaggatcagggatatagtcacatagtctctaagtatcacctcacatattactgacaaaatacaaatggataagtgaaacttttcaatggagaaatctggtggatatcatcatcaagtggtcaaacttatcatcacccaaaatgagacaatctgacattatttgtgcttcttggttgtgatataaacaatattatctatggagtattcctaacataaatatttaacctgaatctaaagaattatgaggaaatcaggtatatccaaaaagtgatatattctacaaaacaactgacctaaactcttcaaaaatgtaagttttatgaaagatgaacccccaaatagttaataaactgtcctaaattaaaggagactaaagaaatatacagttattatcaatgcatgatcctcgctaggttttggatcaggaaaaaaaatttacaaagaatgttattgtgacagagaaacttgaactgtatactaaataatattatatcaatgttatacttcttggatacaataatagtgtcatggtcatataggaaataatccttattcttaagatatatatattaaaatatttaggaaccaaatatcactatgcctataacaaactcccaaatgtttcagcaaaaacagggagctctaatattgagggagggaacaagacaaatttagcaaatgtggcaaaatgttaacaattagagaatctaagtgaggattttagttgaactactccttcaactttattctgaaatgtttcaacatcaaaactttggagaataacttcagtggttttcaaccatgaaagtttattttgcttatgttggctgtcagtgatggcagctaccagccaattgcggctctgcaactttattccagaatccaggccatagaagcagcccctacttggtcttgtgcttcttgtggcagagggaaaagaatgcagttaaccaccttgtgcactggctcttaagagcttctgttcagactcacctgtgtctcagccacacagtcccctggccccagcaagtcccctggtcaagaccaatgtcaatcaagtaggatgcctcctgcagggagccagtaaatgaggttatatacttcacattcaaggaggaatgcaaatcactggaatcaagattcaataacaacgccaggtttcatggctcactcttgtaatcccagcactgtagagtggctgaagtgagcagctcctttgagctcaggagatggagaccagtctggataacatggcaaaaccctgtctctacaaaacaaatacaaaaaatcagctgggtgtggtggtacttgggaggctgaggtgggagaatcacctgagcccaggaagtcgaggctgtagtgagctgtgattgcaccactgcactctggcctaaatgacagagtgagatcctgttccaaaagaaaaaaaaaaaaatccagtaacacagtaattttcccaagatcgcaaagattatctggggcttaaactcagatctggctgtctccaaaccctatactttctttgttctcaaattcatacgctttttaaatccaaatatttgattttacattttcaaatcattatacatttacttgttgggaaattttgtcttttaatgtaaaggtgcctaaggaaaagtttcactctcagttcttttcttgattcacaagttcttaccaaaaccccacacaggataccactgttgagagttcttgatgcctctatcagctaccccattattatgcctctatcagtatccccataagatagaggaacataacctctatcttatgttcctcctactgacccaacatgcaagataccaaacatatggttctgtgcctcacaaagctgtacttttaatcagtttgtgttagtccagatactctgaagaacagataccaagacagaggtaagtatgcaaggaaatcgttaggagaaatgtttgtaagggaaaaggggaaggtggccaggtaaggctgactccatgtgaagaagagaaggaaggaaaattgaatgaacgcattcttgaccaccagtgcagtctaataaagtttcagcaagatcattaggtaaatccccaaagccaaagtgggcatgcctcagtgtccccactgtgctcagtctttggctgggagcagcccctgggaagcaggaagcatgtttgcctcaaagcaaacatgttatttcagagttcagcagctggggccctgggtcagttacactgcctgtaattgaaggtctaggaagcatacaaataagctgtattttgggaatcaaataattgcagaagcatttgacatgcattttacgtgtctacataataaaaacacatttgtatcaattatcgcacatcaggggtcaacaccctctacttccacctgaggacaaattgctgtgaaataacaagagatgaataggcaggtgtaacacatggatttttttttctcttggtatgtgatgtcatgaggctaaatggtacctttatttctttatatatatatatacgtatatatatacgtatatatactttaagttctagggtacatgtgcacaacatgcaggtttgttacatcggtatacatgtgccatattggtttgctgtgcccatcaacttgtcatttacattaggtatttctcctaacgctatccctcccccagccccctacaccctaacaggccccagtgtgtgatgttcccctccctgtgtccatgtgttctcattgttcaactccgacttatgagtgagaacacagtgtttagctttctgtccttgtgatattttgttgagaatgatggtttccagcttcatccatgtccctgcaaaggacatgaactcatccttttttatggctgcttagtattccatggtgtatatgtgccacattttctttatccagtctattattgatggacatttgggttggttccaagtctttgctatagcgaatagtcctgcaataaacatacatgtgcaagtgtctttatagtagcatgatttataatcctttgggtatatacccagtaatggcattgctgggtcaaatggtatttaaagttgtagatccttgaggaatcgccacactgtcttccacaatggctgaactaatttacactcccttcaacactataaaagtgttcctatttctccacatcctctccagcatctgttgtttcctgactttttaatgatcgccattctaattggcttgagatagtatctcatagtggttttgatttgcatttctctgatgaccagtgatgatgagcattttttcatatgtctgttggctgcataaatgtcttcttttgagaagtatctgttcatatcctttgtccactttttgatggggtttgttcttgtaaatttgtttaagttctttgtagattctggatcttagccttttgtcagatgggtagattgtgaaaatttccgccgttctgtaggttgcctgttcactctgatgatagtttcttttgctgtgcagaagctctttagtttaattagatcccatttgtcaattttggcttttgttgccattgcttttggtgttttagtcatgaagtccttgcccatgcctatgtcctgaatggtattgcctaggttttcttctagggtttttatggttttaggtcttacatttaagtcgttaatccatcttgagttaatttatgtataaggtgtaaggaaggaatccagtttcagctttctacatccagttttcccagcaccatttattaaatagggaatcatttccccattgcttgtttttgtcaggtttgtcaaagatgagatggttgtagatgtgtggtgttattctgaggcctccattctgttccattggtctacatatctgttttggtagtggtacttttatttcaacattattccttatcaactctgttgtgagctgagggggcaatagagtgtgtgtgtgtgtgtgtgtgtgtgtgtgtgcgagcgcacataggggtggagggggtgagagggttctggaaaaatgaaaggcagatgaatacaaagatatatacataatctactccttcagctatcatttatcatttctcctcaaaccatctctttcttatcagaaatttcctaatagtaaggggagaaccaaggatacagatcacagatagactttcttgtacaaaatatttttgtttcattcacagaaaatataatatatgtacatatatgtatatatatgaattgtgttaatttttatgtttccaaccctcattaataagtactaaataatgtttatttaaaatgttgatgatacggtaagtgttgaaaattataaatatcacaacttgaagagatagtacagatcataatttcactcccttcttttaataggtagagaagatgaatcacagaaaggctagtatttgtctcaaggtcatataaatgctagtatagcatctggggtcactggaaacgccagagaatgcagaaaatgccaggtctcctgaaattggcatgtggtccttaaaatgctctgaatcggccgggagcggtggcttaacgcctgtaatcccagcactttgggaggccgagacgggcggatcatgaggtcaggagatcgagaccatcctggctaacacggtgaaatcctatctctactaaaaatacaaaaaaaaaaaaatagccgggcgtggtggcgggcgcctgtagtcccagttactccgggaggctgaggcaggagaatggtgtgaacccgggaggcggagcttgcagtgagccgagatcgcgccactgcactccagcctgggcgacagagtgagactctgtctcaaaaaaaaaaaaaaaacaaaaacaaaaaacaaacaaacaaaaaaaaacaaagaaaaaaagaaaaaagaaaagaaaaagaaaaaagaacactctaaatcatcccaccctgcagcagtcacaccaaatccttcatttcatagctttgtgaacactgcaagaattcggctcctattcttagaaagtcaaagaagtgctaatccctcaaacacatgttaatatggattttctttgatgaaaaggaacaaatacattcttcaaaagtaaacttctccctggtccctcatcctatttcagagcaagaaagcctattagactaacagcaagctcattcagagtcttttagaggtgggggtgctcatggttccttgggagtagagttagagttgattaaggtatcctcttttggtcaaacaagatgctttccttcagaaccccttccgcttaattatatgtaatttttttcctattccttcattgttgtttgaaattcccagcctggtctgccttattccttgtctcttagctttgacacttgcctgccttccctcccctccccaccatccaatcttgacctatcctgggaagaagacacagatgggtcctgatcacccaaaagccacctgcacccactgactaactcctgaaatgtggtatagtgagggggaaaagcctaggtttgatcccagctctcgcctttgtccatactctttctctctctctctctctctctctctctctctctctgatgtacacttaggatatttaaagtattttgctgcagtgagcatctgtctatgtaatatctgtgcactggtgtaagtatttcttcagaagaggttgctagcaatggaactgcttggtcaaggttacatgcatatgacattttgatagagactgccaagtgtccatcaaagccgttaccacacaagacacagcagaaatatgtttcttttagatagcacttgtgaatattatcctggtgataaaaggcgacaccttcatgcatctttgcgtttgtgactaaagtccagggtcacaccctctaatcttccaccttttttgtttcatattcaagaccttgtcaaacctagcctggcacttatctattggggtcatcacagaaaatgcaaacccagagcccgtaatttcaacttcttgtcaatctctcatccaaagggctggattttatctctaaatcctgttattaccttttccaccacacaattgcatatctttaattagaatgagtttatccagctggacctttcttagtactttcctcttgattccctgtctcctaattgtttttacattttttttgttgttttacattccacaaacaatgtagtctccctatcaaaattcaaactaagaatatttagggagtaaagcatgaaagtcttccttcttaatctttttgtactatctatatgtctatagctatatctcaaatattattttgtaatccattatttaatatctaactgttccatactgatggtatttggattgctcaaataaatccccaaatagaagtggtaaggcaatgaaatataaggacaagaagaataaagaaaaaataactccctgaacaattctctctgtgacaactgtgggagtattttgataactgttggcaacaggacactgcatgtgatgtggggaaggaaaccttggcattcaaacaagcaaatggtttggcgacagtttattaaatttctgccatgcttgcaaatgccagtagcaatttctcagactgcagaattgctacacgtgtcaggtttgagactgtttcacaatcgtcatcaaataattcatccttcaaaattaaaaattatatgaactctttgagtaatcgtcacttctaaaacaaatgttttactggagtttatggatttcacttgcgcattttgaacacttctgtgccatagaatgaagataagcaaagcatccaggtaacactatatgtaatttagtcttaccgggagatttctatcagactattaaatcttcttcagacaaaaatagtccccgtttcttcttacatttatagctacaaacgcccaccttttaaaagacttcagcattacactttaaggagatagaataagaagagcaaactaaacccaaagctagtggaagaaaggaagttacatagattcaagcacaaaccaatgaaatagagactagagaaacaacacagaaaatccaaacaaaaagttgatttttttgagaagtttaacaaaattgacaaccctttagctattgacaaaagagaaaatataaattattaaaaatcaggaatgaaagaggccacatcactaccaatcttacagaaataaaaggattataaggaaaactatgaacaactatatgccaacaaattagatagcttagatgaaataggcaaattcctagaaagatgcaattaccaaaaatgtagtgggagaaatagaaaatctgaataggcctacacgaaataaagagctcaaattagtcatttcaaaatgttccatcagtaaaagacgggtccagatggctttactgatgagatctgcaaaacattcaaaggagaattaataccaattctttacaaactctttcaaaaggtagaagggagaacactttctaactcactttatgatgccagaattagaattaccctgatgccaaaaccaaagaaatcacaagaaaacagaacaaagtaaaactacagaccagtagcccttaggaatatagaagcaaaaattcttcaacaaaattctagcaaacttaacccagcaacatataaaaatgttttaacatatcaatataatcaatgtataaaataccatataacacaataaggaacaaaaactacatgatcatctaaatagatacaaaaaagtattttacaacatccaacactctttcatgattaaaaaaagctcaataaattatgaatagaagggaaattgctcaacctaataaacattcaacaaactaggaagaggcatgaaaagcagtaagatgcccaacctcattaacctcagggaaatgtacataaaagtaaaatgagatactactttatacccactagaatggctataattaaagaggccaatattcacaagtattagtgaggaggtagatatactggaggcctcacacgctgcctgtgggaatgtaaagtagtacagctgatttagaaaacaggctggcatttcctcaaaatgttgaacatggagttatcatgtaacctagcaattcaatttctacataaataccaagagagtacaggtagagtggctcacacctgtagttccagcactttgggaggctgaggcaggaggatcacttgagcccagaagtttgagaccagcctgggcaacatggtgagactccatctcttaaaaaagaaaaaaagaaaccaagagaaatgaaaatgtatatccatactaaaaatggtacatgcatattcatagcagtgttattcacagtagccaaaaagtggaaaccaaccaactgtccatcaactgatggatgggaaacaaaatgtggtatatccatacaatggactattactcacaaaaaggaatgaagtacgatatatgctacaacatggatgaatctagaaaatattatgttaaatgaaagaagtctatcacaaaaaatcatgcgttttataatttcatttccattaaatgtacagaatagggaaagctacagagacagaaagtagatatgtaattgattaggactggagaagtaggatgggaaatggggagtgactgctaaggggaactaggtttctttaggagggactaaaatgttctaaaactagatgcagtgatggttgcacatccctgtaaatatattaaacaatatcgaatttacactttaaatgggtgaattgtatggtatgtgaattatatctcaataaagctgttaagaaaatttctgacctgtctggctggccttctgagaggatgcctaattcctagtccgttaatcatgacgcttgcctcttcccatcaatcttgacatgcctggggagaagacacagctgggttctgaccaccaaaaactagctgaatgcaaccatcatgaactgcctctgagtgtctaatataacataggctgcagagccaagctgcctacatgcaaatccctgctctccacttcttggccttgtaactttaggcaagttcatttccacttcatgcttccaattaatcatatgaaaaactgcattaataataatacctgcttcatagcatttggggatgactaaagcacttaatgcgtagatggcatttagcacactatcaggtcgttcaataaagcaggttattgctactgcaactagcctcttcataccctggaggctgattctagcccagatttttgggtgactttttactctacttcacatgggaatggcagaagtcaccttcactagactctctaatgcagcaacaggcactagacttctttgctatgccatgaattggcagcacagccatttgggcatgggaagcaagttagcacataaccacagttaaatgcaattatatgtgttttttaattttacaattttctgaatcaagtgtgtatcaactaaagggacagttattacctcattcttagaaaaacaactgtattatggtttactagagaaacaaaccaatagatcatatggatttagatgatataaatgtaataaatctgtaatagagagatttattataaggaattggctcatgcaagtatagagtctgagaagtcctataatctgcagttggcaagctggagacacagcaaaggagttggtatagctccagtctcaatctgaagactgacagccaggggactgatggtgtaagtccctgtctgagggaagaaaaccaatgtctgtgctcaagcagtcaggcagacagagtgacttgtcccttcctccgattttgttctagtcatgacctcaatggattggatggtgcccacccacactggggaaagcaatctgttttactcagtcaactgattcaaatattcatctcttccagaaacagcctcacagacacacccagaaataatgtctaatcagatatctgggaacccgtgacccagtcaaattgacacataaaattaactatcacaggtctaccccttgtcaacttggcattcatacacttctccttaacccatacttaatcttcaaataaaaacattaacaagattataattccacctaacatgattcaactgttttgtgtacaattgaaaatgcactaactccttccacagaagagatgacgtccttgagtggtgcttattcttcttgatatcccaaaaattaaatactaagatgagaagtaacagtacttaagtactaggaagtcaagtcattattcttatattacatgataagggaatgagaggaaagcaaacaatgatatttgatatgtacatgtacacatacacatatagatatggatatgtatgtgtatatatacaacaaaatatttacaataaaataaggaggaaatactcatgataaccatggtcctcatttctgtaatggtcacatagccatagttggtatttataactaccttcctccactaccccatctatattttcttgccttcagcaatcacctcagctggttctttgccttgtagagtgactcaaaacttcattcctaaagggactaggccagtagttgtcctgcacgggttggattattatagttttctttttttataatttttattttttcgtagagatggggtctagctatgtggcccaggctggtcttgaactcctggcctccagtgatcctcccaccttggcctcctaaagtgctgggattacagacatgagtcactgctcctggcctgttgttgcagttttccgttggctgtaatcacaaggcatggtaatactaagagacactctgagggatctcctttattccagagatgctctttcttaccttcattgtaagtagtccaatttccccttggtagtcagaaccagtcaccctggccagcatggtagttctcttctttgccctttggttcagagtatgggagcccaaagtggccaagtggcaatcttaacttccaattcaatggaattgttgtgtctcctggtggaagcattcctccctctggaactaagacctttaggccagtaggccacgtggttgcaggaacaggaagcaaacattttgctactgggttactaaggataatagtgagaggtgccaattctatttccaccccttgattcttgaactcatgaatcttaactatgggagaagcagcacaatatattggacaccaattcagaggatatacagccttctaggaagccttgcccaagccctgcaaggtattattacctattgtcactgatgctgtaactgagtcttcaaaaggcactgttctatttagccagctacttcaggatagtagggtacgtggtaagaccagcagggtccatatacctgggcccattgccgcatgtctcttgctatgaagtgagttccttcatcagaagcaatgctgtatggaacaccatgatggtgcataaggcattctataaatctatggatagtagttttggcagaagcattgcaagcattgaaggcaagtctgtgtctagactaagtattccggtaagaaaaaatggtcctccttccacgatagaagcagtccaatgtaatcaatctgcaccaggtagctggctgatcaccctagggaatggtagacttagtgttgatctcagctgcaggcagattaagcagtcagtggtggccgtaaccaggttggccttggtgactggaaatctatgtttctgagcccctgcatgacttccatccctgccaccatggccactttattcatgagccttttgagtgataacatgggtggcagggaaaagaggccaacctgatatccacagaataggtcattctatccccttggttattaaaatcctcttcttctgaagtcaccctctggtgagcgttcacatgaaacacacatatcttcacaatttttgcccattcagagaggtctgtccatatgcctctttttcaaatgacctggtcaccaattttctaatcacattgcttccaagtctgtaaccatccagccaaaccattggccacagaccatgaatcagtacataatcccatgtctggccatttctcttcccaagtaaagtgaacaaccagtgcactgttcaaagctatgcctactggggttactgggatgatttcttttcaccattgtccttcagggatggcccagagagggagaggggctgtggtgctggagcgctctttttttttttttttttttttttttttttttgagatagtgtcttgctttagcacacagggtggagtgcagtggagcaatcctacctcactgcatcctcgaccttctgagttcaagcaatcctcccacctcagcctcccgagtagctgggactacaggtgtgtgccatcatgcctagctaattttttatttttgtagagatggggtcttgctatgttgcccaggctggtctccaacttctgggctcaagcaatcctcacatcttggcctcccaaagtgctgggcccctgccatttttaggtggtgcttgcatatcatgcagaatcctttgtaaaccaggcctgagttttctcttcctttgtcaactgatcatgggggaactctcaatgagaccacaggtgcaggctgggagagagaaggcaatgtaccaggagtggggaccacgcacatttggaccacttcttcacgtaacttacttgtaccttcaaatcctgcataggactgatcatgtgtataccacttccatttaacaactgagtgctgctctgcacacccagcattattgctttgtgcgtcagataacactcagcttataatgggcagctcaggtcacagggtaacaatggcccatggttaagcattcagtctctactaagggccaatagcaggccaaaagctgtttctcaaaaggaaattagttatctgcgaaggatgacagagctttgcttaaaatcctaagggccttccctttgattcacctttaagggtctgaaaaggctccaaagagcatctctatctgcctctgacacttcaagtaccattgaatctgctggatcatagggtctacatggcagagaagcttgcatggagcctggacctgctgcagagccttttctcattctaggccccactcagaaccagcagctttctggggtggtgggggtgggtcctgaggagaatcagcatcgtcttacctggcaacagcctcggtggggatggtgggggggcattctagtttgctctggaagtgtagatttaatgccctcagaaggggatataaagaaatgcatttagagggcagtgaacattataaacattgaaaaaaaaagcagggagtgtgtttgcaattccagttttcaacttttcacttacttacaatctgattgctgtttgtgcaatttgggtgaatttccctgttggtagaaatcatctctgataaccatggattttattctcatccctttcctctgcaatctaaaatattttgacaccagaaggccctgaaggtacaagtaagttgcatgaaaatcaacccagtgtgctcttgcatgaataaaaaatttccatcattctgtcaatgagaacttgagaatctaggtggtgatatataacacatggcccaaatgttgataactgattatttaatttacaaacaggctggctggctgatttttacttgccccagtttcatgacaccccgtaatagtttagagcagtggttctcaagcttttttcattatatcccccacccaagtaacgtttttagaccttttcctaatctcccccgtgacattttaatgcagttgatcaatgatatatctgtttatgtactgtatatgtatctgtgttttaaagattaaaagagtaagctttttcttcaaccctcaacagaataattttctttcccttgggaaaatattgcccctgcttgagaatgcatggcccaaaataggtatccagatttgatgcagtaagaaaatgtaggatgaacaatcttcctcaaacgtggctcttctttgcagcttgttattttcagtagcagaaaaggaggtagctattttattacatttgaatattgccttgctgttccgtgtggtccacgatcaccagcacctgggagattgctggaaatgcaggatcccagcctcaccttgtcctgctgaatccaaatctgcattttaacaagactctctgttgattccgatgcatgttgaagcctgagaagcactggttgagagttcagtcccctgctcagttggaaaacattaagtgtaacttagtgtgaatagaaaaaaataggcataggccctaaaaccaatgtttaagtctccccatccctttctctcaagtcctcactaataccccaagtttctttcttaaaagtcatcagtattacttttccaacttagacctgagtgtattttgtttgtgtgtgtgagaaaggttaattttatttacttctcctaagcaagcaagggaaacggcccgtggagtttcaccctgctagctcctctgcttctttccttgtgctcttctattctaaaaagcagggaccttagattcagttggacagagcaagataaaaacaagaaagaacacaaatttctgtttttctccccaataaattggactttcaactctcagtcaagacctctttaaagttaaacttattttaatagtgatcatttctcttggatcaagtgaataagtggacccaggaacacaataaagagattttctctatttttgctattttgaagagccagcaagttagtgcagggaagagggtatagaattaactcaatatacttgggcccttatttatgaagatgaggttaacttattaatttttttatgtatgtgaaattttgaaatatgtgtgaaacatctcaaccatacagaaaaagcagaaaaaatagtgtaacaaattctagatactcacacctagtactatggtctgaatatttgtgtttccccaaaattcagatgttggaacctaatccccaatgtgctggtaccaggagatgggaccttagggaggtgattaggtcatgagggtagatccctcatgaatgggattagagctcgtataaaagagccagagggcaccctctccccttccacggtgtaaggactcggtgagaggcattatccgtgaatcagaaaatgggccctagccagacactgcatctgctggcaaccctttgatcttggacttcccaacctctagaactgtgagaaatacattcctgttgtttataagccacccagtttatggtatttccttatagcaacctgaacaaactacagcacataggttagcaatttgccacattttgctgcttctttatttttctgaagtattttaatataaattatggatagtatgacatttcacttctaattctacagtgcgtatgttttttttaagtaacttttttataaaagatgagttttaattaactaaaactgttgagtttaaaactacagggatttccagtagcaaaaagcttccattattcttcctattgctttttctcctaatagcaaaggtcaagaaaagaacttgaacctgctagaattgttccaagtaccagctgaggctttattctttggtgtttcaaaaaaagccttgacagtagaaagctaaattctctttcatcataaaccattgataaactgtggtcaagttgggccaaaagccaaatccttcctcactgaaaaaaatgctgtggaaagatttcgctaaataacagtagctctttcttaactaagaatctcagttaatattttggtgcttttaaatgcagaaagagggaagggagggtagaaaaaagtgataaaaggagaatcagaagagagaaaagaaacagatgatcttatgaatccccaatttatatcccccaattaaggcatctctttcttctgtctccctatatccctttctattctaacattattgacccactacaataaaattaagtatactttaggctgggcatggtggtttacacctgtaatcccaacactttgggaggccgaggcgggtggatcacttgaggtcaggagtttgagaccagcctgggcaacatggtgaaaccccatctctactaaaaatacaaaaaaattagccagacatggtggtgcacgcctgtaatcccagctactcaagaggctgaggcacgagaatcgcttgaacgtgggaggcggaggctgcagtgagccaagatcacgccactgcactccagcctaggccacagagcaagactctgtctcaaaataataataataattattacactttaaacagagacagggagaaaatgtgttccagttcagtggccgggggcagtaaagaaaaaaatagctgtagtagctgagtccaggtcgcttaccattttgacatctttccagccctagtatatggttttgctattaggagaattgcttaatctggctgggtgcggtgactcacgcctgtaatcccagcactttgggaggccaaggtgggcagatcacttaaggccaggaattcgagactagtctggccaacatggtgaaatgccgtctttactaaaaatacaaaaattagccgggtgtggtggcacatgtctgtaatcccagctactcaggaggctgaggcagaagaatcacttgaatcaggaggtggaggttgcagtgagccaagactgtgccactgcactgcagcctgggagacagagggagactccatctcaaaaaaaaaaagaattgcttaatccagccgggtgcaggtgcagtgacgcatgcctgtaatagcagcactttgggaagccaaggcgggcagatcacttaaggccaggaatttgagactagtctggccaacatagtgaaactctgtctctactaaaagtacaaaaatttgtcaggcatggtggtgcacgcctgtaatcccagctactcaggaggctgaggcatgagaatggcttgaacctgggaggtggaggttgcagtgagctaagatcctgccactgcactccagcctgggagacggaatgagattctgtccccccaaaaaattttttttaattgcttaatctttgtttctgaatttgcagactcaaacataagagcagtgtagttttctatttgaaaatgcctttaagatcacatatctcagtcccattttctgtatacaaagaaccaaagttccagaggtgttaggtggcttctcagagactgggtctgagggaaaagctttttgcttctggaatggccagtatatctctacctttgatttttagtgctccaggatgttgagtccctatcctaggaaggaatgacaaggatggtcacttccgccacaggccctcaccctgcatcctgcttgttaaacatcatccaccccaaggggcattttcaaagcctctgctgttccttgccattgtgtgccctggctccaagccaacagacaagcatttgaacttctgtctctgtgatgacgtctagcttcagggaatcaacagcctggccttctttataatgctaagcttcaaggaagaaaatatcttgcaaaactggtcccattcccaggagcactcccatctataaggtgcatggccagccttatcattctgtgaaacaaggaatcattttaaaggctgtgatacaagaaaatatctccttctttgacttctcctgagaaacagaaatcttggctagtggggtagacagaatgttgtcacttaacagaatatcagttatgaaactaaacattaatctgctgctgttccagtaagctacttttcagtagggcctaaaagagcattccagaaagactaaaatcatccacctggcttaaagggggcagatccaagaacacagcggaatttctaaatctttggaagtgaaaatgcatcattctgtttcttgtacatccaattttcattgtagcaagggagatcaagtttatccatggtctctgacatcttctcaaagatttctaaagacgaaagaatgcagctgatgctgttattttaggtatagaattccgtcatcattaagaatttgattaacaaaaatatatataaatgtttacagctattcattagagaaaaaatgcgttcaggatacatagtaaacaccaaataaatcataagcagcctgttgttgctacgtacactcttatttatctgtcttaagttggagtacctaataaattctgtacttcaaaagaatgtcctaaggtctagatccaaaaaaagggcaacaatggatttaatcttttttttttctgtaccccaggacaaattcacaaaaatgcaaaggattattctgaagttgtgtttttccttgttggcacagtgggagaaatattctcttggcgaataggcaaagtaatagaatcagctactaataactcaagtattactgttgccaatttggccccatgaatgaaacactttaaaaactgcctgacttttttactaagtaccctgaagaaataattagacaagggtataaatgtataagaatgtgcatcacagctttaaaatgtttaaaaaaatcaaagtgacctaaaagtaaataaaatgcagtttgttcaacaagttattatatccctacggccaacacaatggtgccgtcagggctgatgttgcagtagattggttaacttggaaagatggttgtaagaatgaaggtaacgtggctgagctgtagagtaaagccttcagatacagatagacctggaatcatgtccttgttctgctgttggccaactggatgatctggaaatttatctcactctgaccttcatttctttcatgtgaagaatcaaagttgataatgaaaatagaacacttggcactgagactggcatattgagatactgaagcttaaaagtaccatcggcttaacaaatatgctgttgttttaaaaacttatgtacgttatataatcatactcctgtcaaatgacatatggatttatatattcatccagtagccaaatatttattgagcatttattaacagacaagcactttgttaggcaaaaagactatataataacaataagccaaaaatgacacagactttgccttcaaagagtcctgctcatgactgattgtgatcaattaagtgtgaaaccccagctataatgcaagagaggaaggggataatgagagcttgcaagagtggggttggattcagttgggaagggcagggaagtttcctaaagaaatggcagctaagcagaggcagaaggatgagtaggctttgactagatgagatggatataaatgaggagcagtgcacataacagttaggcacattgagtctagagtcagccaggtgtgcttccaaagcttgctccagcactgtcttagttagttcaggctgctataacagaataccatagattgagtggcttaaacaacaaacatttatttcccacaggtgtgggggctgggaagtccaagattatacaatagatagaataccatagattgagtggcttaaacaacaaacatttatttctcacagttgtgggagctgggaagtccaaaattaatgtattggcaaatttggtgcctctgaggatctgttctctggttgatagatggccatcttctcattgtatccttttttttttttccttgagacaagtcttgctctgttggccaggctggaatgcagtggcatgctcacagctcactgcagcctcaaccttccaggctcgagacatcctcccaccccagcctccctaatagctgtaactacaggcacgcaccaccatgcctgactaatttcttgtggagagggcatgtcaccatgttgcccaagctggtttccaactcctgggctcaagcaatctgccttcctcggcctcccaaagtattggtgttacaggcatgagccactatgcctggcatataagcagagagaggaagcaaactctgtgtctcttctcataagggcactaatcccattgataagtgctctgccatcatgacctaatcaccttccaaaggccccacatcctactaccatcactttgggggttaggatttcaacacatcaattttggggggacacataacaactacccacaagctgtcacaactctgggcctgttgctcaacttctctgtcccagtgacctcacctgtaaaatggaaataatagttttccttattcaatatgattatgaggattaaattcttaaaagacactatgaaaaaagcttagcctagtgcctaatgcatagcaactgttcagtaaatgttagataatactaaagaaataaaagaatgaagaaccaaatcaactgcatagcagaagcagcatatgccaaggctctgtgggagctcaatgagaaaaaaagatgaagccctgttgtttgttctgcttttattctaaacactgctggaaaccattgaggatttaagcaggggcactctgtgggctccatcctcttcctctcaacctttctgctacagccacaccttctgactctctttctgtagtacttgtgacaaggcctttgcccgtgatgtccccttttcacagactcttctttctacctgccttctcctacctccttcagactccagccttcagattcccctgtgaagtcttccctgacctccctgatagcacgttcttttttaatagcaccctcagtgatcgctttgcctgatttatgtctctctctcccacctacatcttcacaagatgagacactgtctgttattgcgtgcagttgtgtcccagccactagcatagtgactggcctattgtaggctcttatttcccactggataatggaagatggaaagaatagaaaagaaagagggaggaggaaaagtagaggaaaataaggtggggtggggaggcattgaggccagctcaatttcagacattgattttgagtggtacatctaggtagccgtttctgaaaacaggtgtggaggtcaagagaggtagactaaggagtccttagaacatgggaactcacttaagccagtgaatgaagaagagcagagtctttggatacaaggcttgaggtcactaactatcaatatggacaagttacgaagtcactgaatcctctttaagagccacacagagacagaacttgatcccagccacacagacccccgatagcatgcttcccatatccccaggctggtcacttggagcaccctgaatattgatgatacataaatgagacactcctaatggtttggcttctgaagtttattaggtacttactgatatccatcagttatagatagggttgttgaaatacgcgtaatcatacctttcccccagctcccgctaaggtgttgcagagatctaaagagaaaatgcacatgaaaatactttccaaatatcaagtgtcaaacatgtgaagatgacattgtcattacagagatcaagtgacaatattaaggatggtttttttctttctagaagggagaaatacattgcattagagtccatctttttagacacttttgtggttgcctcagtctattcaaggttttttgtttttgtttttgttttaatttgtaccactcaatctgttttaagaaaataccttcgactgggtaatgtatagcaaaaacttattgttcacacatctggaagcgaggaattccaagatcaaggcactgactgaatcaatatctgctgagggctcactctctgcttcaaaaatggcaccttatggctgtgtgctcacatagctgaagggcaaagtaggtccatcaagcctctttttctttttcttttttcttttttttttttttgagacagagtctaactctgtcacccaggctggagtgcggtggcgcgatcttggctcactgcaacctccacctcccaaattcaagcaattcttatgcctcagcctcccaagtagctgggactacaggcatacaccaccacacctagataatttttctatttttagtacagacagggtttttgccatgttggccaggctggtcgcgaactcctggcctcaggtgacccgcccgctttggcctcacaaagtgccaggattacaggtgtgagccacggcacctggccaagcctcttttataagagcattaatcctacacatgaggacttcaccttcatgacctaatcatctcccaaaggtcctacctcttaatatccttacctcaggggttagggttcaacatatgaattttgaggggacacagtcatgcacaccatagcagtggttaggagcattggtcttgaactcagaaacatctggtttaaatctggctcaattattcctagttgcctggtcctgagttagggaattttctaagcctttgtttccgcatctgtaagatggaaataatagtacctcctcacgaaactgcttgatgttgcctataaagtgttttgcacaatgccatccaaatgggccttaataaatgttaacaattaatatcatcatcctatttttatttatttatttttaagactgggtcttgctctattacccagactggagtgcagtggcacaatcttggctcactgcaacctctgctttgcgggttcaagcaattctcctgcctcagcctcctgagtagctgggattacaggcacacaccaccacgctcagctaacttttgtatgtttagtagagatggggtttcaccatattggccaagctggtctcaaactcctgacctcaagtgatccacctgcctcagcctcccaaagtgctaggattacatgtgtgagccactgtgcctggctatcatcattgtctttaagagtgctctggagagcagggaccaaaggaaagaattactgaatctatctcaattcctttcagcatcctctcatctggattatattacccaaggtacaagatgttgcattagactgcataactccctgcaacagaatggagagttcctacccttcccacttgctgtttaattaaggacatatattaagcatagctgtcctaagcagggactctcgcgggaaataaagtataacttaagtcatgttatatgcagaaagacaaatcttttccctgcccatgttttggagactgcacaggaaagacctaatgtgtttattccaggcatggctcttttcttatcttggagaatgatcttgaataagccatttcaccattatgggcctcattttccttaactgtgaaatgaataagggagaaatggtggggagtgaagttggaaagtatctgtacattctccccaaaggttttcattgttaggatttcacgcttgtagactaatggatgcctgtccatcctttgtttgatcctggcaagtgtttgttaaatgttattttctcccccaagaaaattccattaaaaatcattttcatatcacctaatttcttataaaattgctaattaacattcagtaaagcaccaactactgagttgataataaatatgttttataaaagaaagaagcacctgtaatcccagcactttgggaggcctagttgggcgaatcacttgaggtcaggagttcgagaccagcctggccaacatggagaaaccccatctctattaaaaatacaaaaattagccgagcatggtggtgcacgcctataatcccagctactccagaggctgagacaggagaatcgcttgaacccgggaggcggaggttgcagtgagccgagatcgtgccactgcactccagcctgggcaacagagcgagactctatctcgaaaaaaaaaagaaaaaaaaaagcactataaaagaaagaaccactaataagtgctttttactgattttaattggcaggcaaaactaatctaatgatgtaatttagaagcagacaatcctgaaagagaatgttcctgcttatagtaattaaaaccaggtgaggctagtgagttgttaatgtttcttgaaggtacgttttgagtactgtattgttataaaatacctgaaggaaggtgtcactttgggagagtaaggtaagctacatgctggagacaccgtgggcttccctgaataggtttatttggctagaaaagagggtgggaggggcacagcatgaatgtgcttgtgggctcatcaggacacaatgttgaagtcaggcttatttcaaaaagtgatctgggccgggcacggtggctcacacctgtaatctcagcactttgggaggctgaggtaggtggatcacttgaggtcaggagttccagaccagcctggccaacatggtgaaaccccgtccctactaaaaatacaaaaattagctgggcgctgtgggggcgcctgtaatctcagctactcaggaggctgaggcaggagaatcacttgaacctgggaggcgaaggttgcagtgagctgagatcgtgccactgcacttcagcctgggtgacagagggggaccctgtctcaaaaaaaaaaaaaaagtgatctgagaagataatggtgaggaataaaagaagttaggtaattgggaacccgttaaaaaccttacattctatccataagagcttaaacttacatgagagacacttgggaatgtatgtggttctggaaataggagtatatttttctctaaatttcagagtgtgggcacactttccagcaccttctccacacccatggggaaaaataaaccatccaacacagaaataccaaatctgagatgtgagaagtcactccatttaaacccagccctttccttcattgcttgttttaggaaatgtgcctcgacaccctagtgttactttgaattcagaattagaatgggtggaaagaattaaaaatggtaagctgtcccaaaacaccaagtcctcatttatatttacctgacaaaactgcttatagagtcagagtgaaagtgattgtgacaggtgggggcaggcactatgctcaaggagaagagaacagaacttagaggaactctgacagtatttcctccccattcctcccaaattgccccatgctccctggtgcagtgattcctacaggcagaaccacaacgaaaccagttcccaaacacttgttaatgaagcagtattaactgccgccatttctttcaccatccttttgctgatgttttttaagttaggaatttattatttgtttttatgtaaaaaaacacactgtcctttgaccaaaactttagtcagggccctctgagtccttttcttgactagatccaaccttaggcttccctctctgtctttgtagaatccagtttgagcaagaatcctgctaagtcagtttattgaaaattccccccacccagtatctgaccttcgatatcttgtcaccctggcctgccttcagcaagaaccctaacaaatcagtttagctagaaaccccttatccttgatgtttcttcttagtacttttttgtccactgacacccccccaaaccctgctactgagttagaagtccacttgtccttgttgttggaattgagtccaatttttctcccccactgctgcagtagttcccatacctatctccatggcctcccctttgaataaagtctgccttaccatctttaacaagcgtcatgaatagtttttttcttggaatgttcctgaaaccaccattgcaaaattataactgagacagtgaaagagacctgacctaaccaactccatcttctaacctccaagctgatcttgtttattcctgggcgtaggctgaactaactttgggaggaacttagttcattgtttatagtttgacacaaagatggtgacaacgttttcccaaaacaaacccccttcttgcctggggactagactgcctttgtaggactaacaaattagccacgagattagaaattatggtttaagagtcattcaggcggaggctgtaagatcctgaccctccataaactgctcctaaaatcagtgtttgagatatttcgcagaccctgcacttgatggatcagctggtgccaccccgacggagaaactggctcatctgatcttgtggcccccacccggaactgactcagcacagaggacagtttcaacttcctatgatttcatctccaacccaaccaatcagcactctcgacccactggtctttccctcacctaccaagaattatccttaaacactctgatccctgaatgcagagagactgatatgagtaatgataaaactccatcttccacacagccagctctgcgtgaatgactctttcaccattacaattgccctgtcttgataaatcagctctatctgggcatcgggcaaggtgaacccattgggtggttatattcctaacacaaagaaatgataaatgcttgaggacgtggatattccaattaccctgcttgctacactgtatgcttgtatcaaatcatcacctgtaccccataaatatataaaactattatgtacccataataattaaaaaaatttttaaatatttttaatatatcttatgcattagttgctttactaagtataaaactcaagtctgcaaattttttctacatgttttttggaggcttgctttctctattatccatgtgggcaataccctcatagacactaaatacaagagacaattctcaaccctctttttagccttggactgtacaaacacctccacctttagctcctgattctctcccagttccttttgtactttttgactgctctttcttgtgttctttctctgggttctttctcttcctacctcttactgcagttatttccttagatttatccataaacattcacttctttgtctgattgatctcattcactgctcctgccttctagaaagttcctcaaacaataatccatagattcgttgcatcagaattaatcaaggtacttgttaataatacagcttcctggggctgctgagattaaaacttctgaaactcagaattttaacataattttaaggaaagaatcataatgaaggagctccaaaggattctggggagaagatagtccagtgatcactgttctagaagatgctgctaatatttatatttatttctttagtcaatcctgagggtttcctgttctctagagcactcattctaacagtctactggtcaccccagctatatttctctctctcaactcatcccaaacctgcaggaattatgtatgccctctatgtttcttattcctttaatgacactatttataacctccacatacagccacctatgctagaaatctgatacctacatgttctctcctttctcacccctacatctagctgataacataatcctgttgaccatgtttgtgaaatatcatctgaatccacccggtttttcatttatcacacggtgaccatttacttcacaacttggtctctttctcaggatattgtaatagtttagacttgactaacaccctgattctcttttctgtaatccatcctgcacatttcaatatgagtcatcattctagagcagcactctcttgtagaacttcctgcaatgatggaaatacattttccaatatggtagcccctaccctcatgtgactattgagaaattcatatgtgatcagtgtcagtggagaactgcattttacatataattgaattcaaatttatatagccagccaggcatggtggctcacacctgtaattccagcactttgggaggccaaggcgtgtggatcatctgaggtcagaagttcgagaccagcctggcaaacatggcgaaaccccatctctacaaaaaatacaaaaattagcctgcatggtggcacatgcctgtagtcccatctactggactgaggaggctgaggcaggagaatcacttgaacctgggaggcggaggttgcagtgagctgagattgcaccactgtactccagcctgtgtgacaaagtgagactctgtctcaaattaaaaacaaaacaaaaaaaatgtatatagccacttagatctataggctaccatattggacaccacagttctaaaatatgagtcttttcttatctcattgctttcaaaaagctcattagctgtaggatgaggtctagacagtagcgtgaatgctcttcgtactctaacctccccttcagtttctaccaccaccaccacctacctcactatcccgatcccacatacactttagtactgtagaaccttgctttttctaaataaaccataatttttcaatctcctagctctggatcctgctgtttcctctatgtagaatgcctctcctttatgtccttcccttcagaatttgacccatttttcaaggtttaataaagaaagccctggccccactcccaacaaaaggaacagccccttatcatggaccttggacaagccatttagtgtctctccgcccagttttctcatctgcaaagtgggaatgataacatttcctcttttatggagttgttgggggattagatattgcgttattcagactccatcactgagaaagcatgcaataaaaatagctgttattattttctgtcctcctgtaacatttaccatgtggtatcaggcatctttcctgataagactctgtctcccctcaagactgtgagcttgttagcaagaaagcctctatcttgttcatggttgtccttcagcatccagcacattgttgccatttgtcaaatgccttggctgggtggcaaataaataacttagtcagttactcacataggattgcatagaatttttttaagtatgacatttttgtgtatatttttagggaggagtaaaagacatatagctgtagcaagaattagaaaaaagaagatgccaacaacttttctttttaagcatcaaatccttctcattactgcccagaaaaactggcataagctgttgttaaatctgtgccccttctcctcggttgactggagtacgagttttaacattttgccattttgactttcctttctgggtcccctgggtcctctcctcccaccccctccctgggtactaagttttcatcactgtcaccacggcaacagcaaggatgcctcattcctcacagttctgcacagctaaactctggtcgcctttgtccactgagctagctgaattctttttaaatacaccactaaatcaactatctgctgtacagaacttcatccattattcaacctttaaaaaaaaacaaaaacaaaaacaaacaaaaaaacaaaagaaaaaaactgatgtatactaatttcttctcctgggaatggcctttttccagacctgccaatactcttgaatacaccatacatttttggtccctaggaacaaatataaaaattgccagtgtacgtgcgtccaatgtaagtgtggtgcaattttaaagcacgcaacagagcattcataatgggtttcccttttaaaagcacagtagaccaaaaataaacctgacaaagggcagctgtagagttttaacacgtggaaaactccacaagcagcagttatgtaacttgaaagaaacatgataaatatttcacaccattagatgaacttccaactctgacactgaaaaaaaagcaaagaacaagaacgcgagacaaatgcacctcaaatctccaaggagcaaaaagcttaaactgagaagggaccaaggctgtactaaaatctgagacctgacttccagcacgagtcttgattgcttttttttttctcgagttcgaggcggagcccgcgaaccccatctcctcagagcgccaccccctcagcttcgcccgttgggcagaattttccaaatatctccacccctaggctgaaaagccagaaagaagttttgagccaacgaggggaagaaaggagttggggcaaaacaggaggcgtttccctacccgcatacatccccgtccccgagacacccaatccccccacccccagcctgcccgcgcctcccgcccccagctcctcgccctggggacagctggcagccccgcgcggaccagacacaaagccgatcaatcccggaggcgtgggggcggagggacgacccgccggggctttcccgggcgctgctctcctcctgctgccccctcgctaggacccggcggacgcctcgtctggttttcacgccctctagcccctacccccacacccccaaaacagaacagacccccatccctgggctggaggacccgcctcttggcagccagctgagaaggcgccccggggagggggaaactgacatcccatctagagccgtccctcctcttcctcccctcccgactctctgctcctttcccgccccagaagttcaagggcccccggcctcctgcgctcctgccgccgggaccctcgacctcctcagagcagccggctgccgccccgggaagatggcgaggaggagccgccaccgcctcctcctgctgctgctgcgctacctggtggtcgccctgggctgtaagttgctcgggttcctctacccttcctgcctggaccagcctgcccccaccctccagccccccacggggcgctggctgacagtgtctgggcggctctgggccgaggtcgccgcggggcgtctgaccttgcgcccaggcgagcgggaaacccagggtgcccgcgagcggacgctgggagcaagggagcgcgaggtcgtgggtttcttgtgaattgcgtctgattttgtcagttctagatacagaaaattaagggttcccactagcaggttctcatctgtttgcaaagttggggtaagttttcagacagagggacgtgattcgaatgcaaaactcactacccactggtaagatgctaagaccccaagaaagatggcatcactgggaggcgggcgccggccacactttgagtccccggggagggggcagcgtccgcgtggtctgggctctgtagcgtcccagctgagccggcgatatgcagcgcacttgtggggcggaggtggagggaattcgtggctgctgagccagaattacttttatcctctccacctgcacatctacattcacttagagaagtctggtctggggactctagccagctgctctgtcctcaggggacatccaacgggacgattgttagaaagattcagaagccacatgatccagtagctggggagacgtcccaaagccaatttcaccggatgattttaaacaggattttcacggattctggactcatgagatttgaaatcctgggaacgttgccgttattttgttttcttcgcgttaactttttaggaaaatggaggaaattacaatagactaagcaatgcagttctacttttgctttttcttttttctctcaccttttttgttttgcttttttcccttccttccttcctcccttcctttctctttcttctttctttctctctctctttctttctgtctctctttctttcttttgtaaaatgagttattgttgctattcacgttctggtaaagtaacacttataatacttaacctgcgggacgagtgtctaataccacaatacaatgatattttctcacgccctcgctgcccaagtgatcatcgcacagctcaagtgatgtgagccacgtccctttgtggaggaggaaggtgcacattgtctcaggcaagggacatgtactgaccaatattatataaagtcaaaccagaaagccaaagtttcacaatgaaacccttgtgcaattctgaaatatcaattggtatcatatggaacacacagaagaaaaaaaatgcactcatgctaaaaggcaacagagaggtaggctggagaaatcgttaacagaacaactgagaaagttatgtattctgctgaaattctaaatttcaaatagaaaagagtgtgccttttagtgtagaattgtcactaattaaaaacagaaaatcgttctgctgtgctattcctattgaatcaccaacatagaaacaatacaccccaagtctgaaattgtagtggagaaacaaccaagaggcgaacaaaagcataaatgaatggggctgagtgacctcttcaagctttaggtaaatataacacattgtctctgctaaacttgattcctataggggatgtatttggaagtgttgtggggacttttctatattgttcctgggatactaaaagatctggcattgcaagagtgttttctttgtatgtgggtgtttttttttttatgtttaaaacaattttagaacagtttggatttaaataaaaattccaacgctagtatagagagttctcatatactccacacccagtttcccacattgttaatatcttacattagtatggtacactttattcaaatttccttcattcttacctaatgccttttctattccaggatgccatccaggctaccatattacatttagttgtcctgattccttaggttcttcttggttgtaacagtttcttaggcttcccttgctttctcttactataatgggtttgaggagttctggtcaagtatctggtagaatgactgcgaattgctgtttctctgatatttttctcataactagactggggttataggttttttggaggaagatcagaaagtggtaaggggcctaggtaaagtgacattttcatcacattatctccagggaacataccgtacacatgacttattgctgttgatgtgaacctaggtcacctgtaatcatactcctaatgtagtgcataccagttttctccacagattacctacccttttttcttcatttccatactagatttttttggaaggaagtcactacatgcaacccacacttcttcaggaaggagagttatgctccatctccttgaaggcggagtatcttcataaattatttggagctcttctgcatgggagatgggtctctcccttcccttcatttatttatttaatcatttatttttctatcagtatgggctcataaatatttgttttatactttgggttataatccaatactattttatttattaaagacttagtggatttcttatgctgttattacatattcatctttttaatattcttcccagatgtaactgtgccattcttttggccactcctatcatttataatatcatgcttactcccttctttcctttttatcctgctgtttatcagcattctttatatctttcttagtagtctggaggattgcttttttgttgttgttcttgttatttaaacgatgatgtcagtatccctgttgatatatggatatttttgtgtgtgtttagttgaattacatttttctttcccactccattaggaaaggaatttcttgatgtttgctcaccactatatgtccagtgctgagcaaagttcctggttaatagtaggtataaatatatgcctgttgattctatggtgccttagtccattcaggctgctgtaacaaaataccataaacggagtagcttataaacaacgtttatttctcacagctctggaggctgagaagttcacaatcaagataccagcaaattcagtgtcaggcaagggcccacttcctggttcatagatggagccttctcagggtgacctcccatggcggaagaagcaaggcagctctgaggtctctttgtaagcgcactgttgtcatgaccagatcacggtccaaagccttcaactcctaataccatcacattggtgattagatttcaacatatgaatgtggggggacataaaccacagcagatggaatggggatgaggtagggtaggtaaaagaagtgtatagattgaactgattgcaatataaatcatgaagctctaacttcatgttaagtaggtggagtgttagatttctctgaggcatcatttaagctgatatgtcaaaaaataataggaatgagtattccgtgtttggtggggtgttgtcatgccttttggggtctctcagagccaaggagctgatcatgaatcagttcctgattccacctaaccagtagcagctggtcctcagatctggactggaacctgatccaggcgcttagcctgagtctaatctctcatcaactgataaagattgtggtaggggagagaggtctgaatcttttgtaaaatcacaaggttctgcctttttgccagaactgacccaaaacagcactccagggaaccggtactaggaaaattctgccctctgtatctattgttaagaagcaactgccataatcaatttgctggagagaagtggttccgtgctggcacagtctcaattatctgatgaacagaaacgctaaaatgggcttgtaggtggatttaacaaccatttcaagactatgaaagaaattatattagaaagaatgaagtcaaaaacaaaaacttcagcctgagcacagtgagttccctatgactgaaaacactcatttatcctcccacatgagcagtttaatgagaggagcccacaggagcttacggatgttcaccacccatggtttccattgcattggtttcctcctgtgggccttcctcatagagaagatgtattggaatatagaggtaagagctgctagctttattgaagtcagaccaccaggaagctataaaggccattcttaaaataatattttttcatcccatagcaatatagtagtaacactgctgagtcaatactccagtatacccctcttgctagactgatgttttgaggaagatggtggtgaagatggaaaaggggaatcagaacctgggtcaggtgcctcctttggcaaaagcagcaaaataaaacttaaaaccagggattgttttcttggacggtgttactgttaacaaggctagaactcagaaaaaataacccaactgtattacttttctatttctgtgaaacacatgaccaaaaacaaaacaatacaaattgattgtcttaaacttctagaggtcagaagtctgaaacaggtctcactggcctaaaatcaaggtatcagcatgaagcattccttctggaggttctagggcagaatctgtttccatggcttttccagcttctggaggcgccccactcacggccctgtcctgccaggctgccacctgtccccactcacggccctgcgacaccaggctgccacctctcttgttctctctcttctgcttccttcttccactcatcaggacccttgtcattaccttgggcttacctgagtaactctggataatttatccatttcaaagtcagctggttagcaactttcatccatctacaactgcaattcctatttaccatgtaaagtaagatatttataggttctggggagtaggatgtggacatctttgtggggctattattctgtttctcacagcagccaaaatgaggttatgcacagcgacagtgttttcagtgctgtagccaagaatattctagattccatgaagccaccataacttttacctttaaagtataactcatagtgatataaagctggttggttttttggttttgtttgtttgtttgtttgtttgttttatttgagatggaatcttgctctgtcacccaagctggaatgcagtggcgcaatctcagctcaccacaacctccacctcctggtttcaagcaattctcctgcctcagcctcctgagtagctgggattataggctcccaccaccacgcccacctaacttttgtatttttagtagagactgggtttcgtcatgttggccaggctggtcttgatctcctgacctcagatgatctgcctgccttggcttcccaaagtgctgggattacaggcgtgagccaccgcgcctggcctaaagctatattttttattagttgtatttcaaattgcatagtatggtggtaaagaacatgcactccaatgcagcactctgtgctcttaccagctgtgtgatcttatacaggttaacacctgtattatgtcagtttactcatcagtgttggtgataatcccaataagagtgcttacctcatagaggtttagggagaattacatgtataacacacttagtaaactgaagaagccattgaagccttttgacattgaatatcagtttgatttgcattttaaagagaatgcattggatggagtatggtgaatggaaggattggggtggggggagtcaaactggggagaccagttagaagttattggagtagtccaggcaattgcttgtgtaagtacttattttatatagtttattgataaatatactcacataattacacatacacatataaccactgacaattgctttttacagttgtcacctaatgatgcgatgtgttctgagaaatgtgtcgttaggtgattttgttattgtgtgatcatagagtgtacttacagaaacctagatggtagagcctgctgcacaccaaggctatatggtgtagcctattgctcctaggctacaaacctatacagcatgttactgtactggatactgtaggcaacggtaaacagttgtaagtatttgtgtacctaaacatatctaaacatggaaaaggtacagtaaaaacagcacaaaagataaatggtacacctgtgtagaaacatatcatgagtggagcttgcaggactagaagttgctctgagtgagtcagtgagtgagtggtgagtgaatgtgaaggcctgggacattactgtatactactgtagactttatcaacactgtacacttaggctacactaaatttataaaacaataaagttcttgtgttacagcagtacgggcgttatagcatcactagatgataagaatttttcagctccattataatctgtgggaccactgatatggttcattgttgaccaaaatgtcattatgcagtgcatgactgcatttgaaatgtagttaattaaatctgatcaggaatttaagaaaaatggctctttggtttttaaggaaaaaattttttaatcatgtgtgctgtgttttcaactttctgttcagttcccaacctataaacatgaaacagtagctcttttggttactatgtataccttctttcaatgttattctctctcccacacgtaagtttattttcagtatttgtttccagtgtttccagagtttccctgagttgtcacccttagaatggtcattttacttgatttgatattcagaagagtggccttctaagttccaaagtgtgtgagtgtatgcatgcatcgggtgtggggggaaagagagagagagagaaggagagagagagagagagggaggatggatggatgtgtgctcagataaatgcctgctgacagcaacacaaaaccctactctatgaatcttcaggccagtgaatgggtaggaaatgctctccagtttgaattgttcctacattttatgagcagagaagcaaatcctgtgaaagtatttcaagagctgccctcttagctgtccattgtcttggctcagaaagtcctaaggaagaatccttgtaaacttaacagacaggaattttggtttttactggagagctctgcttttctttatcgcatgtcatcagcatcaaatttttatttgttttgttgggttttctgttttgttgtagttgtcaaaattttctactgggataatttaggacgggcttgtctttatatttgtaaggagtaaaaatgcataacctggtctgtcttctttatgctaggtttgtccaatttgcttgctttcattttgtcaatgcagtcacctgctgtttttactcttcgctttcttcacattgtgaaacttcctaaatacatactatggacaaaaccaaagataaaaatgaatgaattgttaaacacattttcttatatgtctaactaaaaataatatatgcttagggtaaattcaaacagagcagtaagtttacaaaacaagaaataagtctcctttccagccttcctgactcctttgcttctcagatagaccatccttaagtttcctgcaaatggtttcaggaaattagaaaagaaatagttccagtatatataagcatactcttataatttctttagaaataaagatcacaatttattatgcttactgctgtataccttccagaaaatcaaatcatattatatatagtgttgtgcaccttgctccaaaaagttatttatgttagtaattaaggtacaacctaaagctcagtctacaagcaggacagaagataacatcttatagaggcctttaaaattgttgcaccaaaatgcagtgggagctattttctaactagaaccaccaaaaataatggaacaaaatgattagtaaaacaaagggaaataaacttccaaaccagtaaccaaatatggaaagggaaaaattccaagcaagatccagttaaaaagtccaaaggagaacgtgtgtgcacccagagaggacagagacactagcaccagctaagattcacagacaagtgcaaaggggtgctatttttaaaggagaccaaagaggaaataatgaccacaaataaaaagggaacatgtcaaacttctgggcaagtgctaaatttgaaaagagagaatggtgtttatgttttttaaaaaatgcactagagggctgggcgctgtgactcacgcctgtaatcccagcactttgggaggccaagacgggtggatcacctgaggtcaggagtttgaaaccagcctagccaacgtggtgaaaccctgtatctactaaaagtacaaaaagtagctgggcatggtggcatgcacctgtagtcccagctactcaggaggctgaggcatgagaatcacttgaacgtgggaggcggaggttgcaatgagctgagattgtgccactgcactccagcctgggcaacacagcaagattctgtctcaaaaaaaaaaattcactagatgcattttcaaataggaatggattttgatcagaagcagaactgacacaatggaataaacaataactcaagtatgcatttgtccaataactgaaacatgcagccatctatgtcataaaacattaaaattgtacctaagcatattggagacatgagattattgtactgtccatatagtgcttttggatccagaacaagtcaggttcttttgtgccgtgtgtttgtgtgtgtgtgtgtgtgtgtgtgtgtaaacgagtgaacatctatgccattttatctagatacagtacttcttcccaacctccattcatctctgttgttgttgctattgttcctcatatggccaaatgcaatttctccctgaaggtctaactccaaaattccttgcgccttctcttaattctttccaactcatcaattcctcaaagctgatgtctactgtatattatactctggtgcttttggtatattctttattctcttatggcacttactgagctgtactgttacaatttttccatgtatatctctctgtattgtgagcttgctggaggcagagacaacacatctttaggtcgttggtacctagagtactgcctggcacatttaatacttgattaagtagaattacataagctggaatttaatgtttatttgttttgtagcttcataaaattatataactttttagcaataaaaacctcaagacatatgtaaaattaatagtctcaaatgaatgcataatattactgctcctaaaactccctcctcctctttttaacagtggcctccctaagatataaggaaatataaagactggtctgccttataggattttaagaaattttccagatttcctgatgcctccttatatcctaaaagcacataagttcctcttgaattagtaagcattgattaaaaactcagatgagtcaaacaatacacccctcaaaagttgcttaatctagactagaacaaagcacgtattagtgtgttctcacgctgctgtaaaggactgcccaagactgggtaatttacaaaggaaagaggtttaattgactctcagtttcgcatggctggggaggcctcaggaaacttacaatcatggcagaaggggaagcaaacacattcttctttacttgatggccggaagcagaagtgccgagcaaaagcggggaaagccctttataaaatcatcagatctcataagagctcattcactatcatgagaaaagaaagcatggaggtaaccacttccatgattcaattacctgccaccgtgtctctcccacaacatgtggggattatgggaactacaattcaagatgagatttgggtggcgacacaaccaaaccgtattagcatgttagttgtaaaagttctactctctggagcagggaatctccagactttcccctcatggcctaatctctttgttactcaattgatataatagcaatctatatcccataatgagcaaaagtttattaagagagatgagacaatagagactgttttagtctatttctgttgctgtaacagaacacctgagactgggtaatttataaacaaaagaggtttacttggctcccagttctggagcctgggaagttcaacattgggcagctacctctggcaaggccctcatgctacattaaagcatagtgaatggcatcacatgtggaaacacctgcaggagcagcaagcaagtatgtgcaaaagagacaaaacacaagtgatggcctcattttttaacaacctgctcttgcagttactaatctagtcccatgagaacaagaactcatttgcttctgtgagaattaacccagtcctatgagaatgggactaatatcttcgtgagggtggcagagtcttcatgacccaaacacctcttaaaggtcctaccacctctcaacaccattatactgggaactcaatttcctatacatgaattctgaggaacacatttaaaccattgtagagcctgataaagtgatcttcatttccaaatcaaagatgattttcctaggtgttcttgtccagtatttttataggttggtgcaaaagtaactgcagttttagccgttacttttaatgattttgtgggatcttgacacttgctcattagcacttaaaaaattacccctggatccaggtgagtcattgtctctgccaagaatctcattcagcattaggcaaatgccaaaatcagatacatgtaagaatctcagctccattgtgctactgccacccaggacagctatctaaagatgctggcatgttcaaaaaacactgaatcagtgatcttcaaacttttttatattacatatcctacttcatttcttaaaagaggatatgtcctgacgtgtgttttaataaattgtaatatgtatttctgtatcaacatattaatcataaaacatataatacatagaataaatatcaaatgaatgagacaatggagaattaataatacactaacggggcagaaatgaagtggttatagccctatattatagtgttctataaagcctctataagtaaaataatgtgagattggtacatgaatagacagacaagccaatggaagagtatataaagtccggaaattatgccaacttcatttagaaatcacgtgtatgtgtgtatgtgtgtgtaaaatggtagcatttgaaaccatggagaatgcttaatcaatattgttacaactgggaaccatttgagggaaaaatggatcagaacctgatattctccatgagaattaatttcaaatggatcagagatctaaatgtaaataggtaaataaataaataaaaccatacctccccccgccaaaaaaaaaaaaaaaaaaaaaacaaagtatggatctgttcttctgtaaactggactataaatcaaatgagtgtctgcatggaaaaaataaaacaccctaaacaaatccaaagataaatgactaattgggaaaggatatttgtaagttacatctctgacagagtattatcactgatataaaaggaacccctaaaaattaaaatacaaatatcaaaattttataaatggcacacaaaaaacccagagttcccagaagaaaaatttaaatggttcttcaaatatgaagcttttctcagtataacttaaaatgcaaattagattgtcccaaagatagcacttcttcccttagcaaaatcacataaactcatccacatactctgttattgaagttgtatggaaataggcattctacatactgctgatggagctgtgagatgatacaactgctatggagcagcaatatgtagaaaaattctacatctagcctttgacccatcatattcagcaatatgtagaaaaattctatatttgccctttgacccatcaaccccgttactgggaacctgtgttaaagctgtagttgcaaaaacaggacatgctttatgcatggtgttatttcttttttatgcattgtattatttatttcacaactattataaaaatgattgaaaacaaatgcccatttataggggattggctaaataaataacacaatggtaggcactgtagcgatataaaggaatgatggtgatctctctgtactgtcatctccaaaatatagtaagtgaaaaaagtaagatgcagaacaatctagtgcaacatgctacattttgtgtatgacagaaacactggcaggttaaactgttaactaatgaaactattaacaataggtagaacaggaatggaacagacttctcttactatgtatagcttattacatagatttcattttgaaattttaaatgttttatttcaaaagataaaattcactaaaatagccttccctaaaaatggaaaacaaatggaaataaatgaacttactgagctgggcatggtggtttacacttgtaatccccatactttgggaggcccaggcaggaagattgcttaagaccaggagttcaagaccagcctaggccatataggaaggccacgcctctacaaaaaagaaaaataaataaaaattagctgggcatggtggcatgcctgtagtctcagctactcacgaggctgaggtgggaggtttgcttggtcctgggagatcgaggctgtggtgagctgtgattgtgctactgcactctagcgtgggtgacagagaaagatgctgtctctaaaagaaaaaaaaagaaataaggaaatgaacctactgtatatcaaattagtgatataaccacataaaggaaataattatttcaatctgaacctaaaaacataatattccaccaaacagtagaatatatcttaaggacaaaaatagctacaaatatgttttaaactttagtactttaaaataatgattttgttattttgacactatgttatattataggaaatacaaatcagtaattatactaatgtaaatagaaattaagatttttagtgtagaaaaaagagatatatgtataaagtttttaaaaattaagtacaggtcctataatgttctatctgatttggaaatgttctatttgaattgagtttgaactcacaatgctttcctcttttcaaagctgcttttcctatctgtctactaaaaaggcccagaagacatcacagcctgtatcaatcagctttgaagaagtaacagataaccttaaaaacctcagtagtttgccaccatatgcattatatatttggcttgtattccattttggtggctccagatcagctgctgagtcttttctctacaatcttctttttccaggactcaagctgaagcaattgaccctgtttggaacagactgtccttgtggcctagggaaaagcaaaggacaaagcttagctctgtccttaacagctctaaaagcttctacttaacatgatatgtgcccattggtcaaagcacatcacgtggccaaacgtggaactgggatggagaattgtgttctgcctgctgggaggccctagaaatcatacaataataaatgagaagggagttaggagttgaggataataatataaactattctacaaccccttgaaaatgagcatacttagcatatagactataatccctaaataccattccacactaacaatgactaggaaactttggagggacacctgactccagttttaaggttaggcaatttaagatgagcctgggacggtttgttgccctggtgtattagtctgttttcacactgctataaggaactgccagaaactgggtaatttatgaagaaaagaggtttaattgactcacagttcagtgtggctggggaggcctcagaaaacttaaaatcatggtagaaggcaaaggggaagcaaggcaccttcttcacaaagtggtggcaagaaggacaatgccaagtgaagggggaagagctctttataaaaccatcagatcttgtgagaactcactatcatgagaacagcatgagagaaactgccaccatgattgttacctctatctcgtctctccctttacacgtggggatgatggggattatggggattacaattcaagatgagatttgggtagggacacaaagcctaaccatatcacttagaaagcaaggtagctatcaaagactaatgagattgtgcccaaaggacaaaggaattaacctaaaaagtctttctttagccaaactggaggcaagatgagagtcaaaagagaaaacatatactgaatgcaattgatttaaatgtgttgaatttatttcaaaatgcattaattataaagatacaaaaaagaaaatcaataaaatgtttaaaagtcatcacactttggtcaccattagaattaactaggtcagttactccttaccctgatatttggcaatcaaaataaatacttatctttattctgctttcttttaggcatgtatgtgtaaccacatagccttaacttagaaggaaaagttcttctttatagaattcaagctaatgaatgtcaaagaaaatagataatgaaaaaataatagaatctaatcatcatttgcagcatgtaattgacttagggtatgattattaatggctaaaatcattagacaaaatgttgattggagctttacaatggaaggatcagtctgttatcacctgaaacactgattaatcttagcatcattgaaagtaggacaaccagggcaggtgctgtggctcacgcctgtaatcccagcactttgggaggctgagatgggtggattacttgaggtcaggagttgagaccagcctggccaacatggtgaaaccccctctctactaaaaatacaaaaattcgccaggtgtggtggctcgtgcctgtaatctcaactacttgggaggctgagacacaagaatcgcttgaacctgggaggcagaggttgcagtgagccaagactgtaccactgcactctagcctgggcaacagagtgagactttctctcaaaaaaaaaaaaaaaaaaaaaattggaagcacatagcactccctgtgtaatattcttgcccatccctccaaaaaaagaaaatgaccttcacttgaatgaagcctctcagcaagcgaactttcattacagaaggatagatgcacaaattaaatgacaccacaaggtagcacgtgcatgaactcagaaagtgggtttttctgcagaataactgaccaggtttctgcaacaagtcagtggcatgaaaggtaaaaacaaagggggagagaggaaagagcaggtcggtgctagatgaaacacatgcatctaaaggcctaagaagcaaatgtgatgctgacatgtagtgtgtatccagattcaaataagacatcagggaaatgtggctagatattaaattataacaaggaattatttttgttagttgttcaaatggtgttatagttatatgtctttaatctttagtggtgcttgctaaagtaataaagacaattatttgatatatatgatttgctttaatattcttcaataaagtaaatgtagtaaacatgataaaatctttataactttaatctggatgatgactatatggtgtttattgtttattgtctctatttttgtatatatttgaaaattttcttaataaaaaactatttaaatccataaaatagaaaaaagatagtaacatgataaatatactgaaattctatttttttttttttttttttttgtccttgaagccctctggtcttttttgtatgctccacttttcaccctataggtttaaagagaaaataaatagaacaaagtgaatttacttgaaatatttgaaacatcagctctttttttttttttttgagacggagtctcactctgtcacacaggctggagtgcagtggcgccatctcagctcagtgcaatctctgcttcccgggctcaagcgattctcctccctcagcctcccgagtagctgggattctaggcgtctgccactacgcccagctaattttttttttttttttttttttttttttagtagagacggggtttcaccctgttggccaggctggtctcgaactcttgacctcaggtgatccgcctgccttggcctcccaaattgctgggattacaggtgtgagccaccgtgcccagtcgaaacaccagctctcttaaatcctgtgccttaaccagggtagtcagtataagaaatgcaaattatgtttgaatagtcccttttaaaaagctatttatttagtctatttcccactaatagttttttttttttaatgccttttaaaaaaagagaaaagaaaaccaattcaaccctgtcatcagctagaactgcaagatcctgggttatacagcaaagtctgttagtaaatccactgcataggagctacattttttttttaatgatgtagcgtggacctttcagtgaatttcttttgaaagggactttaatattttattccctaaaatgttaaaatactcatcagatgaatgcatgccacattcatagactgatggcaagaaaaagtgaatataaaaaaagagttgattaaattcctaaaaatttaaaatgtttgtcttgcatttgtttagtggagactggttccatcaaggtcctcttgtccacccccaggctccttctaaacaagtaaagagaatacctgcagatatcttacatttgacacatcaactcaagcacatttcaaaattggccgtagtttctaaaatattcatttaatgttaaagttcttgtcattaataacttagtatcaagcttcctgtgagttcttcatatgatttaatttctcatagttcctttagccttgaagaccccaaatctataaggattctctagagaagatgccggttatgggaaaagaatggaagaagtagaggcatttagcagccacaatagaatagcctggggcctgtgtcagcagcatatgcacactgtcattgtagccatttgtgtcagaagctatttctgtgctggacaacactttctccaaatacactatgaatttatgagcaagggaatgtagatgttaatggaggaagaagtttcacttcacctcccactcctttgcgtcttaattttagagtggaagcaagattgcatcacagccctccatgggatatatattcagagtcctaataatttgaacaatcacatattatttgcttgtacaattatatatatgttcaactatttatatttggccacaagttaccaaaatttgctgagtaatgatgagaccaatcaagaccagcctttttcattatgtgggctagaatgtttaaggagatttatttctaattattagaaaatgaaaggacaaaacattttgggagtgggctattgcaacacttcttttatagagcagttatcccacttatatgaatattgaatacaaatgtttcttttcagagaacaatggacttagatctattttttttttcttttttgggatgggatctctctctgtcacccaggctagcgtgcagtggtgcaataatagcctgtgctaatttatttatttttttgtagagatgagttctcactatgttgtccaggttggtcttgaactcctgggctcaagtgatgcttctgcctccaactcccaaagtgctgggattacaggcgtaagccactgcaaccaacctgactttcatcttttacctaaaagagtattagtcacatcttctcttacaaggtgactcatggcaggttcaaaaggacagggttggtggacagaatcaccttcactttttaaactcattaattttatgaattatatttgtaatatgtatttgccagtggtacattattgaattcataagttaaatatccatgtgaaatgtctctactagatgttcaaaggacctccttatatctaaccacaaacgtcaaattttgttcacaaagaagcaaaaagtataatataaataaaatggaactagagttccaatgggctagattgagtcagttctgcccttagtaatcatatggttttagaaaagctaccttattgtatgagtcttttttccctcatttgttaaatgaaagggtttgatttaatgattatttgtattgtttataattgaacattttatgtttttaaatgggaaaatgtaccatattttagcctgttataataaaattatgttatatgtagctaagaacatgttttaaaattctaaactgcctcctttagaattctcattggttagaacagagcctgttttggaaggaagcaagaaaataggctccaaaaatgctggatattcataaagttgactgtatagcatgttataaactttttgtttgatgcagtaggcaacaggaagttgttgaaggttttgaagagtggaataatatatcaaaaaataatattggagataaacaataattttgccccttacatatagactagacttgggaagaaagggtaactgtaaggcaggccttaggtaatgagatccaggattaaactggaggctgtcaaaatcgtttaggaaaagtagaatccagaagacattgaaaatagaaattgataaaatgcagtgattgattaaatataggggacatcaaagaaatcaaaacagtaactccaaggttgtaaacttgtagaaccagagaaatcatggtatttaattgagaaggaattatttatatatatatatttcaggaagcaataaaatagccaactaaatgtgtctctaaagaccattggagagtggatgatcatgatctgtacctatcccctgtatttaagtggtaaaatggaaagagaaatgtataaccactctgggaaaaacatggagaagattagtaggaggcaaaaaactgaactctggaaaacatacttgtgaaagaatataaaagagcagagacaatgacaaaacaagtgcccagagtaataatggacaaccaacagaaccagtgtcatggaagctggggaggaattttgcaatgtcaattgttatctagaggtcaggaagaatgaagggaaaagatcagggtgaattgttgggtaacctgaggggattaaaaagtaaagaaaaaacaaaattagcatttgaatggaactttacaattgacaaaacactttcagaggaattattttacttaattctcatgttaacattactgtgagacccacaggactatttttattcacagtgtcataaatgagaaacacgggagcttagagtacttttaggacttattccaaggcaggacttagagttacttactcaaaatcccacattctttgctatctggaagacaaggataaaaagaacatgctggaaagtaccaaccaatagtatattttcagtgtccctgtctctcaccacatataaatgccttccatattcacaactcaaatcaaattcaaagcaatattaacctgaagggtaagccataagcctgtaataaatatttcatgttctgaaaatattatttaactaaatgggagaaatatccaaaaatgaacacattccatattggaaggggtttattatccaatttagtcatcctaacaacatcacagcagatcatttaaaatgaaaatagaaaacatcctcataattttctagcctttttttttttttgctgtaagttcatattaaaagaataacattaatattgtcttaagcaaagataagtattattatacgtcatgcatttcctaaatttcaattatgtgttatttttaaaattgctatgtgtgtctgatgataggacacaaggctgtgtttttccttccttttaaaataaataaataactcttttagctgatttctttggtgccattttgtaatttcttttgtctttcactacttcccaactttagtttccataggaacaggatcaatcggaaagcatttgggattctttcaaaatgttgagtccaagatttctaattagggttcaggcacttatagtttaattaatatgagactttttctgtgttttatttttgaaggtggaaaaaactgggttatgatttcataatatgtttgccttttcaaagatttttattagagatttggatcaaagagctttaagatcatttaaaaatgtgttaatacatgcctgaaaaaattaaatatattatgcatactattcttgacagataagaagacttaaaacaataattatcccagttaaatgcatcaaaattagttgaattatccttagctgaaaattgattctttgaaatataacataaacctagtgtcttctcctatacctcttttatagtttgttgttgttgtttttctgagatggaatctcactctgtcacccagagtgcagtggtgcggatctcggctcactgcaacctctgcgtcctgggttcaagcaactctcctgcctcagccttctgagtagctgggactacaggccacccccgaccatgctcagctaatttttttgtatttttagtagagacggggtttcactatgttggccaggctggtctcaaactcctgacctcaagtgatccgcccacctcagcctcccaaagcctgggattacaggcctgagccactgcacccagcccctcttatagttttattgtgagaacaagtatggtcaatggaaaataatgtagatgatagattttacttttaaaaaattaccattatggtcacattacgttagctgtataagacaaaaacatcctcagtttataaaaaaagcattcaactttctattaacagagagtgtgctcaaggaattaaatcaggaattatcaacaggaaggggattacttcccccagggggtactgtgaaattttatgggacctattccattgtcacaatgatgagtggttgctatatatttgctgagcagggaccaggcctcttaaacagcttgctgtgtgccagacagtcctgcaaaataaagaattttcctgagtccctcatttttcataactctccaaagtcctgctgcatgttcatataagtgaaaacttcataattatctgagcttatactgtaacttacactgttttacctataaacacaaatattcttttggacagtcttatcatataactaaatatacaaatttgtattctaatgctcacaataaccatatatatatatatatatatatattttttttttttttttttttttttttttttgagacagagtctcaccctgttgcccaggctggagtgtgatggcacagtctcagctcactgcaacctccacctcctgggttcaagtgattctcctgcctcagcctcctgagtagctgggattatagaaacttgccaccacgcccagctaatttttgtacttttagtagagacaggagtttcaccatgttggccagcctggaacccctgaccttaggtgatccgcccacctcggcctcccagaatgctgggattacaggcgtgagccactgcgtctggccaataaccctattcttatattcctgtactatttggaatggtttctgattttacttaaatcccatttaacattataagtgtacaccaggcatggtggctaatgcctgtaataccagcactttgggaggtggagacagaggatctcttgaggccaagagtttgagactagctggactgggcaacatggcaagattccatctctatgagagtaaacatttaagaaaatttgctaggcatggtggtgcatgcctatagtcctagctacttggaaggctgaagcaggaggatcccttgagcccagaggttcagtgttacagtgagctataatcatgccaccgcacaccagcctgggtgacagagcaagacattatctctaaaaaaagaaaaataaataaaaataagtgtagacttcattgtgtcttctagtgtactcacgtataagcatttatgaattaaaatatgtatttttttatttctctttaacattaaagggacattacattatttcccaaattttacatatatataaattttatgtatataaattatatgtttgtatatgtaatgtttattatctataaatttcatttcaggataataaaggaggcatcaaaatttattataaaatgagggtctgatagtgttaagaaccaataaattaaaataaatgaatgcaaattacatgtatttcatcactgcactaaattcttaggtttgtggtggttgaaaacaaaattatatactctatttttagggaaacagtttttccctttccaagattcatttttagctaacatgagcaaaaaatttaaatgggagaaaaatgttaaaaaataattgcagaacatgctgcagaataaccgtggatatgtatagatgtgggtgtgtttcattaaaatctatttaagtattttttttcctttatatgtagttaaggtaaggatagtttttgagttattcggtgtcaaaattacttttggatttttgtgcaaacaggctataaacctgtaacattatcaaaaatgtcaacatatagataaaacttaatacttttttttattttatttatatattttgagaagatgtctcactcctgtcaccccagctggagtgcagtgatacaataaaattcactgcagcctcaacctccttggctcaagccatccctcccacctcagcctcccgagtagctgagactataggctcatgccaccatgcctggctagtttttgtttttgttgtgtagagacagggtcttgctatgttgcccaagccactcttgaagccctgggctcaaacagtcctccagcctcagcctcccagagtgctaggattacaggcgtgagcactgtgaccggccttatttttatattttatttttttgagacatggtcccactctgtcacccaggctagagtgcagtgacgtgatcatagctcactgtagcctcaacctcctgggcttaagtgatcctcctgtctcagcctcttgagtatctgggataggaggtgtgagccaccgcacctggctatacttagtttttaatttaactggtattgtctgttggtctcatagcctaagtattgcaatacattaaacaatagacagttaatactatatttaagtatattttatattatatgtaaatatagcttatactattcttaaaatacagtacaagaagtttatacatttgatttgaagacaaaatatgtccacttttgtttataacagacatttaattacttcctattgtgggttaagtatgatgtagacacaatcttgtatcaaatagttccaacatcatgctcctaacactatccaatgggaggatcagacatgtaaaacatcctaattttttaaaagtcttataaaaagtactatgtcagatagagaaggtttgactctgtatgggaggacagaaggggccagcgaaagctttacttttcttgacagttaagtcaggtgttaaataacatagaagttcatcattcggcaggggagtgttggagagaggggattccaggcagagggcttggagaatgcagagagccagagtgtctgggaactccaccatgggtgccttgaacatagggtttgtaaggggcagtagtcaaaggaaggctggaaagatgggagcctgttccgaaaggccatttgaaggaacctggaattcatcttgaaggtaacaggaggcctctgaaggaagctaaatatcagatagtattttaaggctctaacccatgtaagagtaaggaggatgaactgcaaacttgtccacatctatattcatccttgtcaatttccctcctgaatcaaaggaagagggttgctatggtttgaatatttgttcccttcaagactcatgttgaaacataatccctaatgtagcagtattaagaggtagggcctttaagaagtgatcgattcatgaggactctgccttcatgaatggattaacccattcatagattaacaatttaaggaattaatgagttatcataggagcgggactggtggctttataaggaaaggaagagagaactgagctagcactcttgcacactgagcccgctcaccctgtgatgccctgtaccacctagggactcttcagagagtccccaccagcaagaagaccctcatcagatgtgacccctctaccttggacttctcagccttcataactgtaagaaataaattccttttctttataaattaccccatttcaggtattccattatcagcaacagaaaacagatgaagataaggggtctctcctacccaaagctaatttcacacctgtgtgcatgatcctatttttccagtctcttgtattctttgttgcagcaattaatctcctctctctgtcatgtatcttcaacttatcttcattactagttctcttaccacaggctataaatatgctcaaatctctacaacttaatgtaggaaagaaccccactatgattctccaaggaaacttcttgaaacagtgacatatatttattatgtcaattttcttactgaccattcagctcactgcacattgcctgtttcccatgccattgaaattactatcattgtatcgccaataatttactagttcctaagtccatggcttgctttatttatttattttttattttacttatttattttttttttgagacagagtctttctctgtttcccaggcgggagtgcagtggcgtgatctcggctcaccacaacctccacttcctgagttcaagtgattgtcctgcctcagcctcccgagtagctggggctataggcgcacgccatcatgcccagctaatttttgtattttttgtagagatggggtttcactgtgttggccaggctggtctcgacctcctggccttgtgatctgcccacctcggcctcccaaagtgctgggattacaggcgtcagccactgcgcccagcccatggcttgctttttaagtcaaaaccttacttgacctttctagaacatcgaacattgttgacactccctctttgaaagtctgccattccgtgatttccatgacatcattctgtcctagtttctcttatttctccaattgcctcttctcaatctcttacatggtttcctcttggactttttctctcttattctactccagtgtttcctgctctaaattatattcctccctagagagtcacagtgctccttagcatgttagaggctccaataagtccttttatacaatggagaactttgtttaacttgttaacccagtctttctcaacccagtgtttctttatcaccatggaatctgtatccctttgtgaaacactaaatgtcaatggccagtctgagggagaagatgcaggaaaagaacgtgaaagaagagaatagtgtcacaatagccacaaaatgtgacaaatcataaaatgctacttaatttcatcaacatagattgaagagaaaagttctatgggttgtctagagtgttgcctagggctttaacaggaaaacttcctagaggtggtgagacttaagaggggtcttgagggttggagaaaattgtaatagggaggagacagcactcccacccatgcctgtacctcctctctgagtgagggctgtacaagggataagaaaggctacatgaacatctcctttgtccttgacatgcctctgaagatggtattaaggtttaaaggcaagtgcttgattatgtaaggttgttttagatcagcattctcagaacaaaatagactatggaacactttttaaaagactgtattgccagacctccaaaggaactcctaaggtacaatgctcactagttttaagtaggcactcaaattaatttaccactataattcattatgatgcttgtattagggttgtccagacaagtagaaccaacaagacatgtgtgtatgtgtgtgcatgtatgtacatatatgtatataaagagacttgttttaaggaattggttcatgtgattatggaggcaagcaagctacagacccaggaattgccaaggctgcagttcaagtccaaaggctatctgctggcagaattccctcctgcttgagagaagtcagtcttttgttcaatttaggccttcaattgaccggatgagacccaccaacattacggagggcaacatgctttaccgatttaaatgttaatctcacgccacacacagtggctcacgtctgtaatcccagcactttgggaggccgaggcgggtggattacttgaggtcaggagttcgagagcagcttggcaaacatggcaaaatcccatctctactaaaatgcaaaaatgagccaggcgtggtggtgcatgcctgtggttccagctactcgggaggctgaggcaggagaatcgcttgaacccaggaggctgaggttgcagtttgctgagattgcgccattgcactccagcccgggtgatagagtgagacaccatctcaaaaataataataataataaaatgttaatctcatccaacaacaccctcacagaaacatccagaatgtttgaccacatatctgagcatcattgcctagccaagttgacaggtaaaattaactatcacaatgctattttcaattgtatatcaacattttaaaaaagcaaataattttaaaaaattgctcaccttgtgttattaaatttagaatgctttattaagcttattttgattttatagtaatagagatttttaaaaattacattgttacggcttttattattattattattattattatttgagaaggagtcttgctcagtcacccatgctggagtgcaatggcgcgatctctgctcactgcaacctctgcctcccgggttcaagctattctcctgcctcagcctcctgagtcgctgggattacaggcacccgccaccacacccggctaagttttgtatttttagtagagacagggtttcgccatgttggccaggctatttttttatttttttgagacaaggtcttgctctgtctcccaggctggaatgcagtggcgagatcacagctcactgcagccttgacctcttgggctcgagtgatcctcccacctcatcctcctgaggagctgggacaacaggagcacataccatgcccagctaacttgtttattttttgtaaagataggatctcactgtgttgcccagactggtctcaaactcctcaagtgatcctcccacctccatctctcaaatgctgggattacaggcatgagccattgcacctggtagttgtggcttttaaaatctccttttaagttactatctagaaaaatattttaggaattgactctatcattttaagcatcaaatatattcatgtaattttttgttgcagcataatgtgaaaattgtttctgcacagtaatgtcttttgtgtcagaattggctacttcaaaatcttttgttctttaatcccgggcagttatctcttaattaaaaaaattaaagtggtatattcattatatcatagtctccccttatccacagttttcctttttgcaattttacccgtggccaaccacagtcgaaaaatactaaatgaaaagttcaagaaataaacaattcacctgggatgggaatcatccctttgtctggtgtattcatgctgtagaagctacccacctgttagtcactgatattgcctgttcctgtcatccaatcagtgacatcgttgtggctgaatgattcgggatcacttgaagcagatgattctccttctgatgtattgtcagaaggtcaatagtagcctaatgctacctcacgatgcctgttacccacctcattttatctcatcacgtcggcattttatctcttacattattacaagaagggtgaatacagtagaataagatattttgagagagacgtcattcacataattcttattcagcatattgttataattgttctattattcttgttattaatcttgtactgtgcctaacttataaattaaactttatcataagtatgtttgtatagggaaaaacagagtgtatatagggtttggtactatccatggcttcagacatccactgggggtcttggaacgtatctctcatgaattaggggggactagtgtgttccattccatcttctccataattcacttcacttccattcattcagcaaatatttactgagtaccatatggcaagcattgttcttcgcccttgggattattaacaaaaattagtagccaaaataaagggccccaccttcagtacataaacacatatataatgcattagaagataataatgctattttcaattgtatatcgtttgaaaatatgaaaaaagaaaaagaaaagcaggatcaaaggaatcaggaatgtcgaaggggaaaggtgagctgaaggtgagctgaaatatttaatagagagatcagaggagattttattaaggaggtgtcctttgagcaaagacttgaagaagtgagggagttaatagacatctaaaggaagagtctttcagatggaggaaacagccagagtctggcctgattgaggatgaacaaggaagccagtgtccctggagcagagggagggaagagtcaagaaaaggaggttcgaaagcaatgggccactttgcataggaccttctatgccaatgaaagaacttccccttctactctggggaaatgaagaaccagtccaaggttttgagcagaagagtgccatgatctgacttagcattttaaagggtcactctagtggatgtgttgagattagattccagaaaggcaggacagaagcaggacagtcaggaggctattgtagcaatccaagaaagagatgttagtgctcagaccacagtagtagctatgggaggagtgagaagtggtcagattcggaatgcattttgaaggtaaagtcagtaggttttgctaatgaataggaatgggctgtgatacgtgggatcactaaagataaatgccagatttttctcaaccagagcaatggaataattgagttgccatcatctgaggtggagaaggtggaacaggtttagaaagaaagatgatatttggatgtagagtttgaaatgtctcataaactttcaggtgataggcatttggatctgaagttcagcaaagatgtccagaatggaaatatgtatttgggagtgtttagcatgtcagagtgtttaatgccaggaatctggatcacatcattaaagaaggaaatacagatagagaagtagatttgaccaaggatgggagccatgagaagaaaaactaggaaagtgtgttgtcctggacgttaagtgtagaaagcgtgttaagaagaagggtgtgatggattgtgtcaattgaggtagttatggaaggcatcatcataaattatgttttacagaggacgagacacagccaaagaggttttaactatccaaaacatatcatagcaaggacaaaaaaggaggaagaatttaaacccagggcttttccactgtaatgaaatagtcattacctttaaaaaggtaggggaggccaggtgtggtggcttacacctataatcccagcattttgggaggctgaagcaagcagatcacttgagcccacaagtttgagaccagcttgggcaacacggtgaaaccccatttctacaaaaaatagaaaaattagccagacatgttggctaacagctgtggtccagctactcggaaggctgaggtgggggatcacctgagcccggggaggttgaggctgcagtgacccatgattgcgcgcctgcactccagcctgggcaacagagtgaaaccctgtctcaaaaaaaagaaaaaaaagaaaaaaagaaaaaaaaagaagatgggggaaaagtataaccctaacaattcatttttcatagaacatcctcatacgcgattattgtagaatcatttgtgaaatgttctatctgcgtcaccacattggataaaaagcaatgtgaagtgaggggagagggatgagaagcaagtatttatagagaatctactgtgtgccaagaggtaggctaagcaattatgtacatgattttatttcatctttacaaccagctagggaaggcattactagcttcattttacttaaactgaggctgtagcttatccaaggtgacgtggctagtaattcacagcactgggtttcaaatactgggttatgacttcctaaagacagaatgattctgtttccatctataatgaagactaagacttaagttgcatttctctaatagactactcttttcttaccttgctagactctaatgttgtcttttatttaattttagatgatacttactcaaaaagccaagctgctgaaaataatagtggtagaatacaatttagttctttatcccaatgggggtaaagtcagttctgataccaccttattaagactaagtgctaagattatgtgctaaggctgactctaaataatttcaaaacttttggtagattctgtcataaatccagttctcttcatgctatgacaaacatcaaacagccatttcacttgagttatattacgacaattagacttttgcctaccatatctggacacaaatacctttgttcttctttccaatactcaatttgaaagagtttcaaaaatttgaccttggctgcgcatggtggctcatgcttataatcccagcactttgggaggccgaggtaggtaggtcccttgagcccagagtttcgagaccagcctgggcaacgtaaagagaccctgtctctacaaaaaacacaaaaattagccaggcatggtggtatgtgcccacagtcccagctactcaggattgctgaggtgcagtgatcgctggagccccgggagatcaaggctgcagtgaactatgatcacgccactgcactccagcctgggtggcagagcaagaccctgtgtcaaaatttaaaaaaaaaaaaattgacctttatccaatagcacaaaaactcatttcctgaccattctaggaagcagctccaaaggtcccactgattttaatgtgtgcagatattcactaaattatttattttattggtctagttcactgatcctaaaaaagtgcgtgttggtgttagctcacagttggatgtgtaggactagttttgaactaaaaaagtcagagaactgtttttaccaaaagaaaagggaaattgtggttcctggatttacaggacccaagaaatcagggtagctaattcttaggaatcttgcctgacaattgtgaatatgacagttaagcaatgccaaaccattgtttccatgttctgcacttcaaaataaatggttcttgttttttggcttcctgaggactaatcaaaggaagcatgaagcaacaatggctgggaagtttcccttggttttcaaatttcttctgtaagcacttgtggtaatagaatttaattaataacacttgtatgtaatgtaagggccaagattttatgagtcatcttccagcaggaaagttgaaaaataaaattcacacagctctcatattttaagaaatgaagtttgatagaaagtgtgcatgctaaatcattggccatataaaatctctagtattttaaaggctgaatatcagatcatggtccgtggagaccatttctttctcccagctttgtgggtggtaaaatcgagaaagcttagtaaactcattaataagtagaagcccaaaattatgtggagtgggatattagttccctgtgtaagaaaaataatacaaaaaaatgcttattcttgcaaattttacaaaatgtgcatgcattgctaagccttccccacccaccctcacttgggccttggtaagtactcttgtaagggttggtcccaaaacttaagccttattaaactcatggtcaacctgtatccctttatgtgcctatttattatatacaacctattttagaaaaagattatctttttctttattttttttttctttgagacagagtcttgctctgtcacccaggctggagtgcagtggcacaatctcagcccactgcaacctccacctcccaggttcaagtgagtctcctgcctcagcctcctgagttgctaggactacaggcgtgcaccaccacacctggctaattttttgtatttttttagtagagatggggtttcaccatgttggccaggctggtctcgaactcctgacctcaagcaatctgctggccttggcctctcaaagtgctgggattacaggcatgagccactgcgcccagcagaaaaggattctctttgtttgagaaatgctaagataacctcatttgcagattatacatttaacagattggtgatattagagaatccttttgatctctttttatgctaatctctgccaaacacattaaactgttagtgattgtggaaattcactcagtaaagcagagaagtaaaactacaaagatataaaggaagtttgaaacaataccaaacatctacgtagcgtgggaggtggagagagtttagtagatggtagtgatgtatcttgtcacatacattgtttaagcagctatttttctttttctttctttctttttttttttgttgaggtggggtcttgctgtgttgcccaagcttgtctcaaactcctgggctcaagcaatactcccaaatcagcctcccaagtaactgggattacaggtgcatgccaccacatccaggtggtttagtaagtaacaaatacctgtggaataattatttctctatccctgacccaaacagcccctgagaaatctgggtgtgtatcagctgttagggtgttttgtgcagagatgcacagattctcacagaatttcagaaccagagttcaaatccaggttcagagactcagttttaaccacttgcccagagctgatcaaactctggagaaatgatttacaatacctaatcttaaaaatgatttatttgacaagtaaatgagtaagtatatttctagtgagaaatagaactgccaaatgctggcagtggttctgtacttttaatctttaaaagctgtatctaggtctaggagttaggtaactacaatttcagattaaagagcaatgaataatcctaatttatatagctctcaaagtctgatgcaccatctctgctgtagaggtgcgcctatacacaacgcagaccatgtctcattagtaaggagggcacccaggcttgttgttctttctctctttgccattacgccaagtgtctgttttgatgtctgacatctttcatattcttctactatccactaatgaagtgttagggccatcgttttgttttctggtaacttactcttaaggagaagcaattagaacacagaatggccaataaccatggcttccactgagtatgtggctcttattagcatccattttggaaggggtatttccttattttgtcttgatagtctactagatttgaattgactgttgccgtctatctaaaatctatagttaatgtcacaggtaaatgaattgtgtttggctgagattgtcacttggggaaaatcaaagactacagaatcctaaaatggcttcttcatgtctgatgaggagtgcctggtgagacattcagccactgatggttttcctgtaccactggctaccattacacaattgaacatgtgcaggacaattttttttgaaatttttgggaatttattttacttcgagaagttaatttaattacttcatctctttctaatatcactgaaaaattttaatctagttgtttgtgcaatggaatgccctggaagttttcctgaacttagtaatgcatgtaacttatatgaaaataactttatcctcaattctgaatcatcagtagtccctcttatacttaagttgtcgaagaaccagaaaagggagagggcataaaacttttgtgcataaatatacacggtttattcaaattagttcattcaccataaacgtttactcattaacactgtctctgttaagatggaaatttgtagtatactctctgaataatatctttacaaccctaaaggttgaaaatggctatgaagccattacagtgtgtctggcggtcttatgtctggagctactttctcataatgccttgtactgatttgagggcagggagagaggaaaggggactgtggagcagactaagcagatggacatcttggcttccctgctttctaaaacactgtgacctccagcaacttatttaactactctcaattgtcatatctcttgatatggtttggctgtgtccccacccaaatctcatcttgaattgtagctcctgtaattcccacatgctgtgggagggacctggtgggagataagtgaatcatgagggcagtttcccccatactgttttcattgtagtgaataagtctcacgcgatctgatggttttataaggggtttccccttttgcttggctctcattctctcttgactgccgccatgtaagatgtgccttttgccttccaccataattgtgaggcctccccagccacatggaactgtgagtccattaaacctctttcctttataagttacgcagtcttggccaggtgcagtggctcacgcctataatccaagcactttgggaggcctaggtaggtggatcacctgaagtcaggagttcgagaccagcctggccaacatcatgaaaccccatctctactaaaaaatacaaacattagccaggtgtggtggcacgtgcctgtgatcccagctactcaggaggctggggcatgagaatcacttgaacctgggaggtggaggttgcagtgagctgagatcgtgctactacactctaccctcggtgacagagcgagactctgcctcaaaaaataaaataaaataaaaaataaaaaataaataaattgcccagtctcagcagtgtgagaacagactaatatatctgtcaaatgaggattttagtgcagtggagtcatttcttacttagaagttaggttcttaaggggagaatttattcatagtgaaaattatccttaaattcctaagatgatcataaactgaccaggacatcagccaccagtaactctaaagtcaagtgtgtcttttctttctccttgcattttggtgtggcttccctttctctgaaaataggataccaatgtctcattaagaggaagggccagattgtctagttcgagagactgtaaagacatgtgtctgcctctttttctttctcccctactctctaaatctagtatggttagacgataatgagatagatgaccataatatctagctccaaattagttcctacctcattgggttactttctattaatatacatatttatccataataaatactgggtggcattattttatttgtcaatgccaaccctgtgcaactttttatatttgttagtatatgtgctaatctgttctcccactgctataaataaataaatacctgaaactgtgtaatttataaagacaagaggttgaactggctcacggttctgcaggctgtacaggaagcatagtggcttctgcttctggggaggcctcaggaagcttccaatcatggaggaaggcgaagggggcacaggcgtctcacatggtgtgacaggcatctcacatggtgtgagctagagcaagagagaaagtggggaggtgctacacactttttggccaggcgcggtggcttacacctgtaatcctagcactttgagaaactgaggtgggcagatcacttgagaccagcagtttgagaccaccctggccaacatggtgaaaccccatctccactattagtacaaaaattcacaggacatggtggctcatgcttgtagtcccagctactcgggaggccgaagcacgaaaaccagttgagcccgggaagcagaggttgcagtgagccaagatggcgccattgcactctagccttggtgacagagggaaactctgtctcagaaaaagaaagagagagaggagagagagagaaagagagagagagaggaaggaggggaaggaaggaaggaaggagggaaggaaggaaggaaggaaggaaagaaggaaggaaggagggagggagggagggaaggagggaaagaagggaggaagggaggaagggctacacacttttaaacaaccagatctcaggagagctcgctcactatcatgacaacagttccaaggggattgtgttaagccattcatgagaaactgctcccatgatcccatcaccccccaccagcccgacttccagcattaggaattacaactgaacatgagatttgggtgggacacagatctaaaccatatcagtataataattgtctttcagtaactatcaaaaccacatggccataaatttttatttttatgaaacttatgatataactgatatccatactttttataatttgcttttatacatgataatgtgatactatacatttaaaacaaacaaaaaacttcaggccgggtgcagtggctcacgtctgtaatcctaccactttgagaggccaaggtgggcagatcacttgaggtcaggagtttgagaccagcctggccaacatggtgaaaccccgtctctactaaaaatacaaaaattagccaggtgtggtggcacatgcctgtagtcccagctacttgggaggctgaggcaggagaatcacttgaacccaggaggtagaggttgcagtaagccaagatcacgccactgcactccagcctgggtgacacagagagactcgtctcaaaaaaaaaaaaaaaaagaaaaagaaaaaaaaaaaacaacttatgtaacacttctccagtttttcctagtcatgttttcaattaaaagtgttaatttaaataacacctttatagtaattttaaaattgtcataatataaagtatatattcttagtcaaaccagactatcttagatgagtaatagagaatacaaaaacttttgtttttaaagttgggaggaaaagaaacacaaaaggtttcatttgactgggaattatttgacttggagttgttagcagttatgaaaataatcatctcttcaccttattttatgaacttctgccagtgcttttggaacatgttcataactgttaaagatgttctgaggctaactttaagacaattgttgacctcaaccagcaggcctacatgaccattttcttttgtttattttcctatttaatttgttctggaaaagtgaagaaaaaataaaaatcacttcaagaatgcagccaacaggggctatacctaacatctgctagtgatatgctgatataaaatccaacattttgtttttataaaaagagttattaggtacaagttttgtaaaaaggaactctaagactagaaaggctaaaacaaggtagaaatcttataaatttttttaatttaaagattcagagctttctgttcaaataagttccacataagtgaccatacattttaaatatttttacttaatttgttggtaaaccctgaagtaaatagaattagaggaagaaaggtagctagaaggagaagatacttaaaatcacaaaaataggtacaatgtatgtttggatgacggctacactaaaagcccagacttcaccactacacaatatacccatgtaacaaaattgcacttgtgccccttaaatttatacacacaaaaagaaaaaaaaaaggaaataaatattcagctactaagaaatactaccgataattaatttattaaagctaattccctttataattttttgcctacataattttgccaattcaactaatcctcttttttaacatctgtgatacatcgtttttctgttcaaatattaatatacacataaaaaatgtacaagggaattaacaaaattcctgaagctaacagctgttatttttcacagaaattttatagtaatttttgacaatttaagaaatgtttcttaaaggaaattttaacaagtagaaaactgtaattgagaaagagaaaatgattttctttctcaatgattcctgaaacccagttcctaaatcttataatctcagagtgtactaaagtttgcctgaaatgaaggaaggccagaacctactgaagaaaataaacattctcagtaggcagtgtgatgtttgaaaagttcaaaggtatgatgatacagagggaacaaagattatctttccctattttgccccgaggttttcctcgactggttttcagggaatttgagtcttcattgttttctctaaaaagtgtaataaaatatttcagaaatcacaagaattgtcagtcataagtagagtttctccgagggcattaattcacacagtgttaaaggagacaaacagactttttcaaagtatactttgaaagtttcacagaacaatggtttggcattggaatcactggcaaaaatgttcagagattttgtcatcaaaaataggagtaggccaggcgcggtggcactttggcaggccgaggcaggtggatcacttgaggtcaggagtttgagaacagccatggtgaaaccctgtctctactaaaaatacaaaaattagccgggtgtggtgacgcatgcctgtaatcccagctactcaggaggctgaggcatgagaatcatttgaactcaggaggtggaggttgcagtgagccgagattgcaccattgcactccagcctgggcaatagagcgagactcagtctcaaaaatttaaaaaataaaaaataaataaaagtaggagtaaagcaacaaggtaggtcccgtcttccctacctcactgaagaggattctggcttggtctcctgtctcattccttcctctgctctctgaagattcagactctatctttggagtctataacatgtgggaagcagaagagaagctaggaaataaaggaatgcaggagaagaaagggatatgggggaagagaaaagaaagaacagctgctatgtgatcaaagtgtgtggaaaaggatatttaaaaagattgcatggacccctttcatggttcttgaaatatacaagcaaaagagttcttttgaaatgactccctggtggacttgacacctctctaagattgagccacatgggtcactgctttctacagacatatttacagctgtcaatagaaaggatcagttcagtcctgtactcttcacatagacaccacgtttgccagtttccctattgaatatgtttgccatttagagctattgaacctgcatatcactggttttcctgttatactagaaatctagtaatttgtgtcccacagacttttgcaaattaaaaaaatatatattttgagtcactgtgttgcccagtctggagtgcagtggtgcgatcatagctcactgcagcttcaaacgcctgtgctcaagtgatcctcctgcctcagcctcccaagtagctgggactacaggcaggtgctaccacacccagataatttttaaaaattttttgtagagatgggggatgttactatgttgcccaggctggtcttaaactcctggcctcaagtgatcctccttccttggcctctcaaagtagttctgcaaattttaacttcacaattagatttgctgtccaggcttttaagggaaaaaagaaattctccagaatagcgtgtgctccttaagagtgataaaatctagcacaatggaagactaatttacatgttgatatatagagatgaataaatcaaagaagagttgtcatgtcatatgaaagatttctctctcctttccaggagtataatcaattctctttcatagttacacaattctgattttatacaaacttttcaaaatcctagaattcatggttctttgccattctttatagtctattggtttattcctgttcctggttgttcaaactggtctaagtctagagcaatggttctcaaccaggagtgatttctttacacccatctctcaggggacatttactatttagggacatttttagttgtcatcacttgggggcatggtgataccggcatctagtgggtagaagccagggatactgcaaaacatcctacagtgcacaggacagccccctacaacaaagaatgattgagtgccagatatcactagtgtcaagatgaagaaaccctcacctagacctcccctctggggttacgttggtgtcctactttcctagatcagcctcttagcttccaccttccttttgtgcttcagagccagtcttttgccttcattctaaccaccaatttctcaaactctcctgtcttcattagaccaatgaaactttccacctggaatctttgttaatctgcaatccttgctagtgttcagcttgcggggatcacggtgtgggcctagtatagcacagtaattaactatgtgggcttcaggtactgactgagtccaaagccaaatgccaccgcttacttcttctatgatcatggccatgtttcttactctctttgtgcctcagttttcccaccctcaaaaatgtgagtacaaatggtaccctgccacagagaattgtaagagtcaaatgagttaatacttgtaaagcgccaagtgcttaataaatgttagctattattatcctttctcaagggtccatcaaggtccttgtcctctaagttacttccttctctgtactctaagtctggaaagcaggtgtaatttactcatgatggtttctcttaaatgtttgcctaaattgtgaatgttttccattaatctaatggctaggacttttgatgtggaaaggcagaacataccctatttttctctctcaggtttggctgtccatatctcttccctgagcactttgtggcataaaggtgagagatgggaaagagatggaaggaaaaatacttcagaacattttcatggatgactcacaattcttagtctgcagatggaagctgatgaatgaagggatgagaggatgggtgcatcatgggcagcacctaagtttctggtgtgagtggccacatggaatgtgatgctttacatagagatgggatttgtaaaaataagacaaagtttgggggcaagctgatcagttttgcctatgagtttgtggtaattgtgggaaatggaaatacagatgtccagcagaaagctgggcttacaaatttaatttcaagagacagattggagctggagatgtggagttatgactttttagcaaataaatgctagttgggtcaatgagagtacaaaatactccataaaaaggaggtagtttagtcagaaaagcagtttctggatggatggatggatggatggatgacgatcgatggatggatggatggatgggcagaacaaggaggaggaagaagaactcacaaagcagacagaatgaagcaccaggatcagaacagaaggatgaagactaggagagaatcaagttacagaatacaagggagtcaacagagtcacatgtcatagagaggtcaggtaagatacagactgaaaagtgtccgttagatatgccaacagataggtcattttcgtcttggtgaaaacagggtcagtagaccacaggaagacagagaacagatggtagcatgagtggagaaatagcatttcaagtaaactatagaaatatatagtcgagaaataaccttctttagattttcatgataggcttaattcattcttacatcatgtataattttttgggtgaataacgaaggacagcagttggattgttttgcctaaattgtctacttgagatgaccaatgtatttgttctcactctgctaataaagacatacccgagactgggtacttcataaaggaaagaggtttaattgactcacagttcagcatggctggggaggcctcaggaaacttacaatcgtggcagaaggggaagcaaatacatcctttttcacatggcagcagcaaggagaagtgcagagtgaaggtggggaaaagccccttataaaaccatcagatctcgtgagaactcactcactgtcacgagaacagcatggttcaattacctcccaccaggttcctcccacaacacatggggattatggaaactacagttcaagatgagatttgagtggggacacagccaaaccatatcaaccaacaataatgctttgcattattctgagtttgaaacaattaataccaatccaatattgtatacttacaatactttccccaaagaattgcttgcctggccgggcacagtggctcacgcctgtaatcccagcactttgggaggctgaggtgggtggatcaggaggtcaggagatccagaccatcctggccaacatggtgaaaccctgtctgtactaaaaatacaaaaaattagccgggcgtcgtggcgggcgcctgtagtcccagctactcccaaggctgaggcaggagaatggcgtgaacccgggaggcggagctggtagtgagctgagattgtgccactgcactccagcctgggtgacagagcgagactccgtctcaaaaaaaagaaaaaaagaattgcttgccttcaggaactcttccttagtatcagtttgatccgacctcatttactggacttttctcattagtatacaataaggaatgggctcatttattcaacaaacatttattgtgtcttgctttatgccaggcactgttctgagtgtttgcgttaatttcagagactataacaggcgacagacttgcacttgtagcatttatattttagatatgtatacttataggaaagtatttaaattatttttaaacgtggtcattacactggagtatagaatgacatccataaagaaagtgatgtagatcaaagacggaattagaaagttatattgatactttctgatactttcttctttagtactaataatgcctaccacaccaggttattttgaatattgaattttacagcataaaagcaagtatgtgaaggtgaaatgggagagttccctgatccccctcgcaggacgtgcgacaggggtgtggctcacctgttctgtagccaccgctgcttgaatccctgaggggaggggcagcatgcagacagacagctgcaggagcccatgtgggtgtgtgttacaatgtgcccttttagccttgccatccacagatggcctgagtgttaaccagctaaacggaccctctgccttttcgcatgggccgagggccagtgtgacagctttctgtatcctgagctcttgcccagcatcccagaaaaatcgggtcacacacggggttgaaggatgaatgcagggttttattgagtggtggaggtagctttcagcaggatggatggggagctggaagaagggatggagtgggaagatggtcttttcctggagtttggccatccagaggccgaatacttctctgaccacccccagtcgaactcctctcggtgttcagacgtctctcctcatctatctttctttgccctgttgttccgccatttgtctgcttgtctcctcatctcctcgcctgctcatctgcttctagaacctgggatttggggtttatataggtacaggacaggggcatggtgggacaaaaggcaacttttggggcatgaaaacaggaatgcctgtcccctttgagggtcacgggtctccaggcctgagggtggggcctttgccagggaactgccttcttctacccagtacttcctgtctcctatctgtatcaaaggtgcctttttaaatgaaaatttctgtgttagtttaagggagtgataataagcaacagcagcgtcatgtaactattagatcacagtagtggtagccaccacagtcagttacttcagtctatagaccggctctcaaaaatcattgaaatgttttggggaaaaaaataaagatgttctgcttgaatttttcatcataatttcatatacagcttatatacatttattatatatatatacaaatttcatcaaaagtatgtaaaatgactcatttctatatgacatgggtattgtcaaggataaattcataaagctatttatacttttaaataagcctaaagagaattagcttttatttgtggggcaataccgtgtgacactagattgcatattaagctgaattaaggatgtaagttatttttcaatgatcgggctggcaggagtgtgttgtctggggtggggtccaaatagatgcatggattctactttggaaaatgcttaaaggccaaagctacaatctagaaaataaacatgtatagtttcatttgctttttcctattttgatcctttaaaactatgtgttatgaattgggtaaacttgtcaccaaactttaggacagttttcttgactattgcatcccattcagacatttgaaaatgaacttttgtataattttaattatcctatctgttttaatctttcagatcataaggcctatgggttttctgccccaaaagaccaacaagtagtcacagcagtagagtaccaaggtacagtatcttactgattttcacaggctgtattgtttaaataactcacgagagtgactcgtgtgatgttattttctatttgttgggattctctgccttaccttctactaattcctctgcctgaaatgctgcttcatgctgactccacctcaagaacatttactccacctcctcagtggaaattttcgatattcaataaaagaccggatgtgcaaagaaggtctcctataacttaaattatctgcacaaagcaaatctaatttgtgaaactgggagatggagagcttggaaagtttctagccagctagatatgatacatagaaatgaacacttcaaactccactctgtgtatttaaggtgatgttaatatagcttactttggggtaccatgttcttatctattttagcttcttaaaaatgtttataaggaggagttaatttaagagcataaagtttctgttttgcaagataaaatagttctggagattgttatatgcacaacaatatacttaatactactgaactatacagttaaaaatggtcaagatggtgaattttacgtttattttgccacagttaaaaaattgtcaaaagaaactagtaacctatatatgggctttttaataagctttcattgttgttgttgttgttttgttttgctttattttgtttgagataggatctccatctgtcacccacactggagtgcagtgtggcatgatctcggctcaccgcaacctctacctccggggtcaagtgatcctcccacctcagccacccaagattacaggcacaggccaccatgtctggctaattttttgtatttttttgtagaaacagggtttcaccacattgcccaagctggtcttgtactcctgggctcaagcagtctgcccaccttggcctcccaaactgctgggattacaagcatgaacaaccacacctgccctataagtttatttcaaatattgatcacctactacttttccaaaggatcctttatcttttatacaattaataatattgggcaatcagaagaattactatttcttaaatttaatacttgtttaggccagagcttattaacatttaagaaacagatcctaaatgtctgatctctcatcatcaggtatgtcttaggttcctggagctggagaaagataggtttgaaggaaagagacaaagattgaagtaaaggcctggagtggggggaattaaatgagttaatatttacatagtgctttcaatagtgcctaacacataatatgaattatgtgtgcttgttaagtaaaaatatgctgtagtaagaatcagtcctggctgggagtggtggctcatgcctgtaatctcaaactcctgaggccaggagtttgagataagcctggaaaacatgaagaccctgtttctacaaaaaaacaaacaaattagacagacatgtggtgcacacctgttgtcccagctactcaggaggctgaggcaggtggatggatcacttgagtgcaggagtttgaggctgcagtgagccatgaccatgccagtgcactccagcctggacaacaaagagagagaatgtctcaaaaaaaaaaaaaaaaaaaaaaaagttcatcattttaaaaaatgagtaatttaataacaaattacttaaaaaattattaggttaactaagttctcttaagttctaacattttatatgcttaagctatagaacactctggtatgagttagttttaaacggagagaggtgggaagaggaaattaacgattgagggaatttgggactatggagcacctccaggatggataaacagggctgggtgagatgccagaatggaagctggaaaggccacaagggtgagcacagagtgcgagaggggtaaatggaccaggatgtccctgagggaccaaggaagtgaagttcagttccacttctcactttcttggaggttcttaatgctgggtccaactgggtgcagtggatgtatatcctctcccatcatatctgagttaggacatcaaaattatattctttaaccttacattattttttaaaaaatgtatcaaggtgaatttcacataacctgagatttgtagtttttaagtgaacaattcagtggcatttgacacattcacagttttgtgcaaccaccacctctacctagttccaaaatgttttcatcactccaaaacaaaaccctgtacccatctgcattactttttaatgcatgttttatttttaatatagaaaatccttccataatgtattgcaagcaaatgttaatctcactccaaaataagtgttttctattttcttgtttcatctcacctctttttaattaagaatttcattttaattctattgtatatgtgtctccatcattccagttttggctcttcataaggcataaatacatttctgtttcttctacattttagtcttaggactagatgcagtaacttaattttgccgtaagtctataatattttatgatttgtgtatatgtgtatgtgtgtttcaccctatttgttcatttgttatgccttgtttctctgaggtcaagaaattatgaattaattccttctttccagcgctgctgtgctgtatcacttcccatgatagtgccaagagcagaaggagactgaaatcagggcagctctgccaggcttgtaaattacatgagcagccctctgcaaagggagtctaaacctgaaagctataaattagagtttaatagcaagcatttcttcacagaagtaatttctgctaagtcagagctattttggtagtatcaattctctttttgtgttatgtatgattttgatgatttttaacttgagccctgagaatgaaatcaaaggataattagcagtacagaatccaggaaaattaaaattcataatgattctatctatgcgattcctaaatgtgattattttgccacatgttgttgctaatgctttttataaacaaagaattctcttttcttgatctaaaggaaatagatattttggcaatgaaataatccccttaatagaaaagacttggcatattttcctgtttttaatatgccttaggttgagaaaatataatttatatctatattttttgctatctcctacagagataacattttatttcaaattggagtgatttataggtaaatttgtgatggtataaagtatatatttctacgtcaaggcaagcttgcaactataactaagagaaattcttcaagggtgaaaacaataatgaccatttacagagcacatactatatgtaaggtggtgccatgtgcatcacacatgtaaatatagtgtctctttaatcttagtgacaactttgtaagatgagtactgttctttttatcattttacagatgtggatataatgttcaaaaaaagtaattctcccaatatcacatacggagtatatggtagaggtctaactctgaagcctctgctataagctaccatgttatagcgcaataaccctaaagcctgatacagaaaattatgctggcataagtactgaattttggctgaagagagagaagagaattcatgagagttaggttgtaagttcatttacttccttatcctcagatattgaccccatgattccagtatttttattctctgcatttgtttcttatggctgccattacaaaatactacaaaccaggtgacttaaaacaatagaaatttattctctcatggttctggaggctagaagttcaaaatcaaggcattagtacccaagggcctaggcactggctctttccttgcttgggatcttctttctcaaagaaccatataatgaattctctccctcttttaaacctttggtcaaatatcaccttctaaataaggtgaactctggctactgtttttcaaaaattgtagccctgtccctagcacttgcaaaccccctgtactctgctctgctctcttttgtcttcataaccctcatcaactgctaacgtactaagtaattcactttattatgtttcttgtttatctgacttcccctgttaaattgtaagatcccaaagggcaaggatctttgtttcgttcactgatacagctcaagaacaatgcatggcagacagtaagtactcaacctattttggatgaattggataaaccatttctcgacattttacatggccagcgagagagaggctggagtgaagtcactggacttaggaaaattattgctatattttctagtataagtttcatagaggtttttccacagcgcaataaggacagaaattaggaagaattcaccaggaggggtgtgtgtgtgtgtgtgtgtgtgtgtgtatgtgtgtgtacacgcgcccacacgcacgcacacacacatgcgtatctaaatatgtaaaacaatgcaattatttaagtgtaaaattactcttaagacacagaagacatgaggaataggctaaaaatgagtgtgggtgtgtgtttaattgttggaaactcacaaaataccggaaggaaacctatctacaactcaagactccggaaggtcaccacccattctccttaatcaacagaaaagaactgtgtttcctcagacaggtcccttagcacacgtttgtctttgtagcataattgtaaacatgtctgtaaaatgatgtctctttgtaatgtaaaacctgctttaaaaactttagacattcttgaaaacaacttttggttcttttcttccttgcctttcttttctctgccctactttctattttccattaccttttattccatttttgtatgtccagcaatatgtgtggaatgaaaaaaattagaaactaaatattctgcattcttttttaacattcatttgcttaacattaaaatcaaaggtatgaaaaggattttaaaataatttctggtcaaagatactgtgcttttttaggtcaaaccatatgccttgtggggaaaaaagtatttcagaaacatggaattgacattctagagagcctggttaaaaaaatacttttaaaaatatttataactggaggtttccatttggcaacttgaggcagttcccagactggcactgggttttttgtttttttttttttctctcagacatctcgtttggacagtgaaaagaagggggttcctttggaggctccaagtattaatgacacaattgcagtaaatttcttgtaataaaagaacttagctacattgaggcagttacacttgatgctaagatttaatactttaataattatctggactgaggcaaggttatataggcagttgtttgggggtaaaaatcaatgatttattaggagaccatattggataggtattaatgtatttgtagagaaggttgacaaagaagggatctgagtgagaatatagcatgttgtggaaacttttctgagtttcccagcatgtccctggctggattcagtgcctttcttgggtactaagcatgaatcaccatctgcatagctggtattcagcaacactgggctgaaacgccattatcttagttgcctcttctaccagatggtagactccttcaagactgacactgggaataataagacacatagttaatcatagctgccatttgttaagtccttactatgtccaagcctgtgtgctttgcatatcttattgcatttgaagactcacaacaactctgtgaaatactagcccatttacagatgaaaactcaaacttgataaccagggaaataagcacagtgtcatacagttactatgtggaagagctagaaggcttccaattcatgggacctgttgatgtaatttatgaatgaatgaatgaataaaactataaaggagtaatttaaagttgtttacaattttgttacctagttaagtaaaatataaattcatggggacaattagaaaacaagtatttttattgttgttcctagaggctattttagcctgcaaaaccccaaagaagactgtttcctccagattagagtggaagaaactgggtcggagtgtctcctttgtctactatcaacagactcttcaaggtaagcagctgtaggcttgaagaggtgtgagcaagagaatgccaagtacaaccaggatcctttaattggcaaatgagatcggacatgactgattactgaaaatgtgtttttgtaagtgtgagatgaaagcaaccatgtctgagacataaaacacaatagccacaaaagcagagaacagagggaggtgaagcccactgaatccctggactcttctctctcaactcaggcataaagtatgcaaaatgcaattgctcttattggctcagtagattaaactccgttccttccttcctttctcttctttctttctttctctttatttctttctttctcttccttccttccttccttccctttcttgcctttctttcttttttcaagattttgttctcttgcccagtctggagcacagtggtatgatcatggctcactgcagcctccacctccagggctcaagttatcctcccatctcagtccccaagtaggtgggactacaggtgcacaccagtatgctcagctaatttaattttatttatttatttatttttttgtagagatgaggtgaggtctccctatgttgcccaggctggtcttgaactcctgggctcaacccatcctcctgcctcggtctccaaaagtactggaattacaggtgtgagccacttgcctggctatagataaactcctgagggaaaggaattaaaaaatggtgtggtttggaaatggaaggttgcttctcagtcataatgctgtcaccctatttccttaactccatttgaaaggtaggccaccactgagaagctcagggagttaagacttatgggtgggttatgacagcaaccattatcaagtgctttcttttcttttttttcttttgttatacatttctttctactacctactcttgccattgaatatgtgatgaacttataatttaaaatattgataatgatggatgaactgttataatgtccatttgcttcaaaataaaccagtggttaatgatacagatgaaacaagataaaccatgcattgattactattatagctggtcaatgatacattgaggtacaattcacttcactttctaatgttgtgtatgcttgaatctttccattataaatatttctaaagctggaaatacaattttacaagttaaaataaacatgttatgattttaaaatactatgtatttctttaatgttaaagaattaagtgaaaatgtttgaagtttatagaaaatttaaaatatctgctcaagttcttatctgtcaagataagactactagctgtaaggtgttaatagcacagctgtcttcacttgaattttttgtagttgccatttctggcatatgcagaaatgcaaaactattattttatgcaacactatttatttgagccattgtacctgcctaatttttacatttttttaaagagatgagatctggccatgttccaaggctggcctcaatcttctgtcctcaagcaatcttcccactcagccttccaattggctgggactacaggtgcaagccaccacaccgggtgcaaaacactattttaattctgaatatgttactatcaaaaaataaaataatgtttttaaccatcttttcttgtgccgcagtgttacgtgagccaccacacataaagttactgttccagtcaattaaaccagactccctggttttctgaagacatgaatatttttacaagggaactagaaagggaatgaggcaagcatttgagctcaattctttaaaatataacatggggctgggcacagtggctcatgtctgtaatcccagcactttgggaagccaaggcatgcggatcacttgaggccaggagttcgagaccagcctggccaacatggtgaaatcccgtctctactaaaaatacgaaaattagccagtgtggtggtgcatatctgtaatcccagatgcttgggaggctgaggcatgagaatggcttgcagtaagccaagatcacgccactgcactccagcctgggcaacagagcaagactgtctcaaaaaaaaaaaaaaaatttacatacataatgtggaagggcctcagtggccaggcctgctggcagctgctcctcacagggcccatgctagagctgacagcctgccagggagctgggcactcggagatggggtgggagcactggggtcagccagagatcaaacacgtcagtgaaggcccagagcagctcggaagataaaataacagtccactttataaaccaacagtgaaacattaacaaacaaaggaaaagttgatgactctttgctagatgttgtggttgaaaataatgtagatattgatgggtttgttgcatggcagggaaccttggcttgctctgtcacctcatttttgaaaagcacatatttgagaagttagacacaatcactgacaaggagattgacatgcttgatctggcatatggactgacagacaggtcagagttgtattgccaaatctgtttgacaaaatctatgggccatatgactgtctgagtacctgatggagtggccagtgccagacaatccactgatatgggcaagaccacctaagcagaataaatagcaatgctttcactaaattttacctattttataattatttcttaatataattaaataaaaacatacatgaatgaacttattattatgaccaactttactgttttaattcaccttgtataactactgaattttatagttctgaaaatacgcaatttttatatttgttacattagaaaaaggtcagttaaatattagaaaataattaatatgacaataccttacaaattttgccttacgtttgtttagcaacttttagcaaaatgttttcacatggccttatgtctgcttacctagaaagtaaattttttaaaaaagatattattatccctgttttatgtgagtgaaggcaaagacctaaaatggcttgttaagggccatccaactaattagaaaatatgtacacacctgcatcttgttactataaggtatatgttagactgaaactggagaaattatgactatcttacagcagcaattagatctgactgcatatggacaaaaacattaattgctcagtgaactgcttaactgacagttattaaccttacacataaagatttcaaaattttgattcagtgagaagtataaggttgaacataggcattacaacactgccaaaaaagttagccagtaaactaaaattagatatcaaaatgaaataaaatatgagaatataaaactatgcttttttgaatttttttttttttttgagactgagtttctctctgtcgcccaggttggagtgcagtgacacaatctcggctcactgcagcctccgcctcctgggttcaagcaattctcctgcctcagactccccagtagctgggattacaggcgcccgccaccacacccagctaattttttgtatttttagtagagacagggtttcaccatgttggccaggctggtcttgaactcctgacttagtgatctaccggcctcggcctcccaaagtgctgggattacaggcgtgagccatcatgcctggccttttgaacattttaaaaactgtcctttccaaaagaaaaattttaaataacagcatctatatacaacttttaggctttaaacttgagtttattaaaagggaaataaatgctttggttactaaatgaactgattagaggaaggtattacacagaaagctacttggattattactaacatcaatgtcttctttttctaaaaggtgattttaaaaatcgagctgagatgatagatttcaatatccggatcaaaaatgtgacaagaagtgatgcggggaaatatcgttgtgaagttagtgccccatctgagcaaggccaaaacctggaagaggatacagtcactctggaagtattaggtgatgtgcatgtatgtgtgtgactacgtctcccactccttctccaccacccagccctgggggcaagcaagcactggtccataaacatgccagcatcaactgggagcctcaaccagtcaagttacagagaccataagcatcaccttcctggcaatctcctggccatttctccccctctcctcattggctgctgaaattttagtaatgcgttatcacaaagtatctctttgttaaaggtggaggcaattcctaatgatcctacaatatacataggagtatctttcctgagagtttatttttcaatagttttcagcatatacacagtttctccaaccatttaaagtagtatcacatgagatggtggagaagcaataacacacaaaaaagtagactgaaggtaggattagaagtcatttggtaaataaaggaaattgacattgattatatacctgatatgttagcccttttcacataagtaattttacttcatcttcattaatatgatttttatagatgaccaaatggaagttaaatgatttaacaaggccatacagctagaaagtgtctggactaagatttgaatccagatggggttaactccaaaaccagtatgtttagtttctataagaatcatggatagattaggcacaggggcttatgcctctaatcccaccactttgggaggttgaagtgagaggatcccttgaggtcagggagattgagaccagcctgggcagcatagtgagtcccctatatcgctctctctaaaaaaaaataaataaaaagccatttgtgttgttatgcacctgtagtctcagctacttgggaggctgaggctggaggattacttgagcccaggagttcaaggctgcaatgagctatgattgtgccactgcattttaacctgggagacagcaggactttctcaaaaaaaaaaaaaataaaaagaatcactgatagtaacagctcaagatggtagtttgtggaggaacacgatctcttctctttcattggtggtgtataatctaccaagttacaagactaaaacagctccccttcctttttctttcttttttttttttttagtatttattgatcattcttgggtgtttctcgcagagggggatttggcagggtcataggacaatagtggagggaaggtcagcagataaacaagtgaacaagggtctttggttttcctaggcagaggaccctgcggccttccgcagtgtttgtgtccctgggtacttgagattagggagtggtgatgactcttaaggagcatgctgccttcaagcatctgtttaacaaagcacatcttgcaccgcccttaatccatttaaccctgagtggacacagcacacgtttcagagagcacggggttgggggtaatgttatagattaacagcatcccaaggcagaagaatttttcttagtacagaacaaaatggagtctcctatgtctactttctacacagacacagcaacaatctgatttctctatcttttccccacatttcccccttttctattcgacaaaaccgccatcgtcatcatggcccgttctcaatgagctgttgggtacacctcccagacggggcggccgcggggcagaggggctcctcacttcccagacagggcggccgggcagaggggccccccacctcccggacggggcggcggccgggcagaggcgcccccccacctccctcccggatggggcggcggcagggcggagatgctcctcacttcccagacggggcggggcggctgccgggcggaggggctcctcactttccagatggggcggctgccaggcggaggggctcctcacttctcagacggggtggccgggcagagacgctcctcacctcccagacggggtcgcggccgggcagaggcgctcctcacatcccagaccgggcggcggggcagaggcgcttcccacatctcagaagatgggcggccgggaagaggcgctcctcacttcccagactgggcagccaggcagaggggctcctcacatcccagacgatgggtggccaggcagagacgctcctcacttcccagacggggtggcggccaggcagaggctgcaatctcggcactttgggaggccaaggcaggcggctgggaggtggaggttgtagcgagccgagatcacgccactgcactccagcctgggcaacactgagcactgagtgaacgagactccgtctgcaatcccggcacctcgggaggccgaggctggcagatcactcgcggttaggagctggagaccagcctggccaacatagcgaaaccccgtctccaccaaaaaaatacgaaaaccagtcaggcgtggcggcgcgcgcctgcaatcccaggcgctcggcaggctgaggcaggagaatcaggcagggaggttgcagtgagccgagatggcagcagtacagtccagcttccgctcggcatcagagggagaccgtggggagacggagacagagagggagggagagggaggaggagggggagagggagagggagcccccttcctttttcatgttgttcatgctccttctgaaatactagtgatgcactagtataggagaaatttaaatcagaaaaccttgcagcagatccggccagtttattcattttctagtgttacataacaactaaatagttctgtagagcggaagtccaacaagaagactgggtatctgcccaaagtatcacaaggctgaaataaaggtgttgacaaggctgagttctcatccacaggctacgaggaaaatctgtttccaggctcattcttggtgttgccagattttggttccttgtggttgtaggaccgagaggtctctgttccatgctggctatcagttcgtgggccacactcaactcctagaggccaccacattccctgttacatggtcccttccatcttcaatgaaagaaaagcatatcaaattcttgtacttcatttttgttgttgttttgagacaaaattttgctctgtcttccagatcacggcttactacaacctcaaactccttggcttaagtgattctcccatctcagcctcccatctcagctgagacaacaggcacacacctattttttttttttttttttgtagagacatgatctcactatgtttcccaggctggtctcaaactcccgtcctcaagagatcctcctgccttggcctccaaaaatgctgggattacaggcataagccactacacctagccttctccttgtgccttgaatatctgacttttccttctgtaatcagccagagaaaactctctgcttttaaaggttcatgtgattaggtcaaacccattcatgaaatcatcctatcttagagacaatggttttggggccttagttacatttccaaaatctttctactacagtacctagattagtgtttgattgaataactggaaaaaaagtgtatttataccaaggactgcaatcttgggagaccaccttagaattctgcagtagaaatactgcaatcttgggagactaccttagaatacagccagttctgggttttgctggataataaataggtcacctaatgaagtttggtttactttccagtccctgagaccagaataacactaatacctggaccaggtattttctaacttggccagttctagacagaatgggatttatagttgagtactgggcctgaaaaaaatactcaggtttggctgggcgtggtggctcatgcctataatcccagcactgtgggaggccaaagcaggaggattgcttaagcctaggagttcaagactagcctgggcaacatagtgagaccctgtctatacaaaaacagttttaaaaattagctggtcgtggtggctcgagcctatattccagctactggggaggttgaggtggaaggatcaatgggttgagctcgggaggttgaggctacagtaaaccatgatcacgccactgtactccagcctgggttatagagtgagattctgtctcaaaaaaaaaaaatctatctgcacacacacacacacacacacacactctctctctcgctctctctcacacacacacattctctctctctctccctctctctccctctctctcattaggcttcttttaaatataagtggtaataaaccaattgaagaaaacagtagagatcgtttatctaataaagaatagctgttgtataagctaaagtaatgcttattattataacagataagcccttaactctcagtgagttgcttaatagtaagttcctttctcacttaagtaaagcctaaatagttgggacagtggtggaggagccatattactttatttcatgaaatcattagagactcaacctaatcttctgacatcttcaatatatgacgttccaaggtcaccattgttgttgacacctacttggtagttgcagggggtggaggatacgaatgaacatgtgggaggtttttaattagtctggcccagaaatgggatatatcactttttcccacattccattggccagaactcatgtatatgaccccatctggcaacaagagtgctgggaaacatggtcgactgtgtgcccatgaagaaagaagatgggtttgttggacaagtaagcagtctctatcacagggtccagtaatcacacctctttacctggctattaaaaccattgattgtagagacaaagtcaacagctttgaagaaaataaacaaccttgattagcttataaataatcaatatcatttgacttccattgttcagtggctccagcagttccatcatgtgaagtaccctcttctgctctgagtggaactgtggtagagctacgatgtcaagacaaagaagggaatccagctcctgaatacacatggtttaaggatggcatccgtttgctagaaaatcccagacttggctcccaaagcaccaacagctcatacacaatgaatacaaaaactggaactctggtaaggtcatttcaagatttgacttgataactgtcttgcatttggataaaaaaattattagaacttaagatgacgtttaatagagagctgataccattgcttgctaagtggagagaggcaggggcaccaggaaagatggcagcacttgtaccacgaagtgatggaaagagctactacaggacatgggaacagaaaacagagactgagggagctgactgtgcaaggaccagtaaaagagcaaaggggcaaaggctcctgaaacaaaggagcaaaggctgtgtgtttatcttttcagaatttaaaaagattctagaattgataatcctataaatgataccaattaagattttcgtagaccctaagctacttcctggtagtaactctggctctttaaaggaaatgtttattatttgctgctgcagtgaactcacttgtgacttaggaaagtgcattaacccttttaccagggaggccttcatttatataggtggtgtttcctaggaattagaaatacctagactactgagtactaccatgtgctataaactttaaaaattgcgcggccgggcgcagtggctcacgcctgtaatcccagcactttgggaggccgaggtgggcggatcacgaggtcaggagatcaagaccatcctggctaacacggtgaaaccccgtctctactaaaaatacaaaagacttagccgggcgtggtggcgggcgcctgtagtcccagctactcgggaggctgaggcaggagaatggcgtgaacccgggaggcggagcttgcagtgagcagagatcgcgccactgcgctccagcctgggtgacagagccaggctccgtctcaaaaaaaaaaaaaaaaaaaaaaaaaaaaaaaaatgcatgctgccttcttaagtaacagtgccccaaagcccactaagcctgattcatgatgatgaatcaggcagttatctacagctgtcttctggcctggaaaattactaagtgcagtctcaatttacaacatcaggaaaatgcatgaaaacttgcttggggataccctgaccatgtgaaaatagtaactgtagtcaatcatggtaggattcctatatcattaaatatttccatgactgtagatcaacaacagttgactctgtgactttagtatctattactttagagtccagatattctgtttcctccagtaaaatattcttattgaaagactttctaggaatactgatgacaatctataagcaagctctgtgaagctaattacatttaaaaataaaaagtattttactttttcatctttgattataggaatagaagtggaagtttaaaaaagggtcattaagcttgaagctttttaaaaaaaattcagtcaatgtaatattctatgtcagtttaaaattgtctgccttccagcaacgcagaatcactatgacagcgattatcaaaaaaaaaaacttaaaggcgtggtgataataacaattttaataatttttaaaaatgtttttgagacagagtcttgctctattgccccggctggagtgcattgacgcagtcttggctcactgcaacctctgcctcctaggttcaagtaattctcctgcctcagcctccagagtagctgggactacaggcacctgccaccatgcctagcaaatttttgtatttttagtagagacggggtttctccatgttggccaggctggtcttgaactcctgacctcaagtgatcgctcgcctgggcctccaaaagtgctgggattacagctgtgagccaccgtacccagccaattttaatgaattttgaaaggaggatataatgcttcattcctttcatctacaagtgcacagtaacatttacaaacagatcttctgataaacaagaaagcaaattgctaaagtggctgaataataaagcctattggatgcagttacttcttaagctctggcctctcagcagtcagcaggcgcagtcagcaggtctgagtgattttacactgagcaactgggcagaaaaacctgctgtcacactttgctatatttacttttcaaatttattttttctcagggcagttggtaaaagccccaaggcaagtctgaaaggatacagattcactttcctcagctaacctcaacccttgaaatagcttgtgatgtcaaaggaatgcacctggattgaactaagataggttcttatgtgagaaatgaacaacaaagactccagtgtatggaagccaatgacttccttttaattaccagctataatatgctggaagatcattttgggttttagtctaacatattatttatatgtaaccttggccatgagttcatggtgaatattctaaaagcattctggctttgaggagagtgacagatgattccatagagtggaaaaaaagaaaaacaggaaaactttctctccctccatctaggaggatctaagacaatgacccttcaaggtgaccaggattacactccctttcttccctccctccagccctttcttctttccttccttcctttctccctctctccctccctctcttccttcctttctccctccctccctccctctcttctttcttttctcctcttcttcctttttgtctgccttcattccttccaaatatcctccaaggggataaaaactactgataaaaataacgaagtctattatatcaatcttagcttttggttgctttgacagggatgggaaggagcaagggctggcttttcttttcaaatttaaaaaaattctagagttgatagaatcgacaatcctataaaccgataccaattaagattttcctaggccctaagctacttcctggtagtaactggctctttaaaggaagtgtttattgttggctgctgcagtgaactcgcttgtgacttaggaaagtgcattaacccttttaccagggaggcctgcccttcatttataaatgatgtttcctaggaattagaaatacctacactacttaatactaccatgtgttatgaactttaaaaaacactcattgccttcctaacagtactgctttcatggttaaaaaaaaaaaaaggaacttctctgtatgtattttatctttgttcttctcgtcaaattaagcaaaagtctagcttaaactccttgaagtcatggcagatttttaaattcatagtaaagacagaaagtcccaaatttttaaaaaggaaagacaaacttaatgctaaaatttgagggacagggttatttaaaaagtctacttatagatctatggcttaaaaaaatatatttttgcatccacaaatagcaatttaatactgtttccaaactggacactggagaatattcctgtgaagcccgcaattctgttggatatcgcaggtgtcctgggaaacgaatgcaagtaggtaagcatgaaatattgggaggaacaaatggtttgcaattcgactgtgaagtacagcagttgggggtacaaggagcaaggagcaggaaatgtctgagtgacttgaagaataaacaggagagaatgactaaaattaacttgatatgatgtgttgcaaagaagcaaagatgctgtttttaagccatctcccaaataagccaaaaatacttagtattgtatttaacaactttttttagttttttaaataatcgtttttaaaatacattcttctaagtagtctttctctcaaataaaagctaagtatcttgtagtctaaattgttgaaggtccagaagtttgaatttctgatatttttaaaattcaggaatgtatatcattgatattattcaccaaattaattcaggtgttgacatttatagtcaacgtagcacttatttaagtaatcagaaagtatccctttcaatgctgctttgaaattatcatttaaaaaaattcatcacaacatgtttaaaaattaaggcattgttttctttgtttcctttattcacatacgtccccatgggttttttttgttgttgttttgtttttgtttttgcttttttgagacagggtctttgtctgttgcccaggctggagtgcagtgtcgtgatctcggctcactgcaacctctgcctcccaggttcatgcaattctcctgcctcagcctcccaagtagctgggattacaggcatgcccaccgcacccagctaattttggtatttttagtagagacagggtttcaccgtgttggtcaggctgctctcgaactcctgacctcaggtgatccgcccaccttggcctcccaaagtgctgggattacaggtgtgagccaccgtacccggcctgtcctcatggtttttaccattaccttgtcctaccagcactatttctgtttatttttccttccatttaaatggtcctgtttaatttaaacatctacctttgccttctcttaaggaatcatatccaggaagtcatggttttgatgtattagttactttttcttagcacacaataaatacataacgaataaaatttaaatgtttgtttctccactaggaccactttaatttgaacatgattctcacatatctactctaagtacaagttagcttaaaagttaaaattagtttgtttaacggtcatccattgatccgaggtgttttgtgtccttggttgggacttacatcttttgaaatacatacaaattcataaattcatttttttggttttctttgtgaattataactatattcacatgtaaccaaaattagaatatgttaactgtcctaaagaaattttttcaaagtgcagcaagtaaagcatggatttgttggttgtttatggctgcctcactataaaactccagcagactccacccacactgggcctttcagcagtttagttccttttctttcagtaaaaaaaatggtaccttccttttataaagacttttttttcaaaaaaaaaaaaacacaaaatattttcatacttaatgttacattttctcttcactgaggcataatatggctgtatgacttgctcaacatcacagaaaatggtgaacaggatgtaagaagttaacttactccttatctattactcttctgtctcccatttcactgaagaaaaataacataaaattcatactacaacttagcacttacagaacaagacaattttttgtcagtagtttcttttagggtgaatccttccttcatagatgtcaaattcattgacaaactacaagacagttttttttttttgtcagataatagcccttactttgaatgcttcatagatgtcagatttaatgactactacaaagtaaatagaaggtacactttggttctcaggaatttcacttactgatttgactttgcctaagattatgattactgtagatttttttctctctctgctctttttaatccaagtaaataaaaagctgaatcttattgacctctcaatacccaagcaaactgagtttataccaagcaataattaatgttttctactctggtcaaattacttaacctttcaaaagacttatcaagttttcttttttaaaaaaatcaattaatattttggaggtatttaagaaaattaataacacacttggcattaggaaagaatttcgagaccagaagtttttatgataagcagattcacttaaacagtatctctaaaaagatcatttccaaaatgtacattgctttaaaatatttaaattatttttgagaaaatgctatgtaatattttctctaggttatttaatcataggctaattaaaacttgctttgtaaaatgggaactctttgaagaattgctcctttaataaatacatgggaagtatctaaatggcagaagagtgtggctcataaaatcctcatggacaagatggagaaatatggtccaaacaatattttggtggatccacacacagttgaatcccatgctcagagaatgttaataaattgtgttgtatgacaggaggtgtctgctagcctgttacatagttgtttcctaaacaaatccatgttcatcatgttattaatgacttgaatgagagtatttttaataaaattctcaatttgcagaaatgttaagcttggaaggttaataatgtaattattaggcaacagaatcaatctgagaagaagaaaaaaacttcacagtagttatttccaaacttgggttcaaaaaatccagttgcattacattagaggacggatgccttaacagtcataggaaaagcctcagagaatttaattcatttttcataaatgggatgacagtttagttgcatatatgtatatgactgtgtatgtgtgtatacacccatatacatataattgtatatctacacccatataattcaagaaggaacgtatttcttacacttagttttacagaataacaatgacatgtgcttttttttaagagacagtcttgctctgtcacccagactggagagaagtagtgcaatcatagttcactataatctgaaactcctaggctcaagtgatcctccaacctcagcctcctgagtagctgggactccaggaatgcaccaccatacccggataatttttttaatttttttattttttagagatggattcttgctatgttgcctaggctggtctcaaattcctagcctcaagcagtcctcccacctcagcctcctgagtagctgggattacaggcatgagtcaacatgcctggcaccatgtgttttctttgacgttgagtttttctttatttgtgaaattgacacagttgatgatgtaggagaattttaagtaagacgtggggtagggagtggcagtagaatacttgaactcattgaacttcaaagattgcttccagtcttttaatcctgtgaattattacacatctccaaatgaatgcaaaagaatacattttattttttaatctgagaagtttttaaaatttagtatttttccaaagcttaagttctgttaatatttttaatcaattttgaaccatgtcttagaagtgagttagttgaacaggcttcacaatcgttaaagtatgctttatgatatagctgcaaaggggatctttttttgaaccttttcaatttaatgactgcatctgtccgtgtaatccacatatatttatgcgtaatttattttacattccagatgatctcaacataagtggcatcatagcagccgtagtagttgtggccttagtgatttccgtttgtggccttggtgtatgctatgctcagaggaaaggctacttttcaagtaagtgaatttcacccttctttggcagataactttctatggctatggagtttatttatgagatactgtttctcctaggaagttgtttttttgtttgtttgtttgtttttcagacagagtcttgctctgttgcccaggctggagtgcagtggtggcaaaatctccactcaatacaacctccacctcccaggttcaagtgattctcatgtctcagcctcccaaatagctgggattgcaagtgtgcaccaacacacccagctcatctttgtatttttagtacagatggggtttcgctatgttggccaggctggtctcgaactcctggcctcaagtgatctgcctgccttggccttccaaagtgctgggattacaggtgtgagctattgtgcccggccctctcctagcaagttttaacaaactctggagaatattgttcatttattttctgctatagaaaatgttcaggatgacatgcaggtggcttatgaaacaccttggcaaacctagggagaaaaggcagaactgcctagttgcacattccagggagcaccacagaatatgcaagaggcatccttggagtggtgcagtgcagcgagacagagatattcaatgtgaacggatatttatagtatctttgcatgtttttaagatttttttttgtttgtttttttgagacggagtctcactgtgtcgcccaggctggagtgcagtagcgcaatttcggctcactgcaagctccacctcccaggttcacaccattctcctgcctcagcctcccgagtagctgggactacaggctcccgccaccacgcccggctaatttttgtatttttagtagagacggggtttcatcgtgttagccgggatggtctcaatctcctgacctcctgatccacccaccttggcctcccaaagtgctgggataacaggtgtgagccaccgcgcccagacaagatatttttaagttaggaattgtatatctcaagatataagttgatttcaaattctttaagaaatttcattgaaataaataagtgaaatatttcatcagtgtagaacagtgaaatgttgaatgttaaatttaggacaactgtatttagaagagaattgttcagctgggtgtggtggctcatgcctgtcatcctaccactttgggagtctgaggcgggaggattacttgaggtcaggagttcgagaccagcctggccaacatggtgaaaccccgtctctactaaaaatacaaaaattagccaggagtggtgacatgcacctgtagtcccagctactgaggaggctgaagcagaaggatcacttgaacctgggaggtggaggttgcagtgagccaagatcatgccactccactccagcctgggtgacagagcaagactccatctcaaaaaaacaacaaaaaaagagaattgttcagtcaaaaatagaaacctattgtatttatgagagctacttctgtacacagttttgaattcttcaaatttagacctcttgtaacttcacacctccatttgataatgcaataggtttgatgtaaatgggtgggatttaaaaatgttttattctcttaatgcatttcttcactccctctttaatattattggagagctcagaagctgcagcattctatcagggccactggcaatagtgtgtaaaataaaattcttaattgaattataaatttatagcatatacaagttctagacccattgttttacagcgaacattaatttcggaatttagatttttaaaacaattttttttttttgagacagggtctcactctgtcacccatgcctggtgcagtggtgtgatcaaggctcactgcagccttgactttccgggctcaagcagtcctcccacctcagccttctcaagtagctgggactacaggcacataccaccacacctggctaattttcttttattttttgtggagacaggttcttgctctgttgttcaggctggtattgaactcctgggatcaaggaatcttcccatcccaacctcccaaaatgctaggattacaggtgtgagccaccactcttggcctttaaaaatatattttatgccaaaaataaacttaaatataaaatgtgttcctaataatacctacaactaggtattatgtctcataaaatgtttccgtggacatggattcaaagagatgccctataattaagaataactgggctgggtgtggtggctcacacttgcattcccaacactttgggaggccgaggcaggaggatcacttgagtccaggacttcacgaccagcctgggaaacatagggagaccctttctttacaaaaaataaaaaataagccaggcatcgttgcacacacctttagttccagctactcaggaggctaaagtaggaggatcgcttgagcgcagaaggtcgaggctgcagtgagttgtaatctcaccactgcactccaagctggataacagagcaagacactgaccaaacaaacaaacaaaaagagcggctctgtcaattaatacttgttcagtgcttcaatttagcccactttaatgtaactttatgaattgaatccagctgtggccccctgctggtcatcagtgaaagtacagacaaataagataactcttccaaaactcttgtcatctttatctatagcctaaaataatactggtctgagtttttttaatgaggagttagtaaaaaaattttcctaaaatattgaattaattaaaagttgacttgaatattaggagttcgttacctaagaatgttactctgatttttcatctagcagaaaaatctatccaagagaagcatattcttgaatatatgtttaggacagaggttggcagactactatctgtggaccaaatctgccctccccgcctatttttctatggcctatgaacaaaaatggctttacagatgaacatttacaatctatttgatgatagggcccgctgactttgaaccccaattaagagaaatgttatcttccccaaaagcattccatttctctaactagtaggcctgtttttcaagacttttattattattgttattattattattatatttttattttatccataaaaatgtttggaaatttgtttgctctcttgttacttaagtacctatatagtatcctcttggccccaaagcctaaaatggttgctgtatggctctttaccaaaaaagtttgccaactcttaatttagaaggtataaacgtcagcaagtgaagattaaaattaataaaaataaattaaacccaaactcatttttatatgaatctgtatcataccataataacccttgcattaatgatatatactttttcttttgtagaagaaacctccttccagtaagtatactttcctacaatgcatgtctttctcctatgtcaactaattttctattaatcatctgtttaaagtcaaaagagagaagttgggttatttgtgtaggtttactctcacaagaagttactcaagtttatcaagaaatacatctgtattaggctgttcttgcattgctgtaagaaaatacccgagactgggtagtttattgtaaaaagaggtttaattggctcacggttctgcaagctgtacaatcctggcaccaacactgcttggcttttggggaggcctcaggaagctttttactcatggctgaaggcaaagcgggagcaggcacgtcacatggcaaaagcaggagcaaggttggggaggtgccacatacttttaaacaaccagatttcaagaaaactcagtcactattctgaggacagcatcaagggggcggtactaaaccattcatgagaaatccgcccccatgatttaatcggctccaacaaaccccacctccaacattggggattacaattcaacataagatttgggcaaggcaaatatccagactctatcaacatcccacttcacacttcatacctacttgtaaatggtagtacagagagaatgatgattacccagcctacttgtaaatggtagtacagagagaatgatgattacccagacaagaaatatggtcactaatttgatttcataggcatttgtataaactaacttaaaaaaaatttactgtattttgctaaattgaaaattttcaaataaaattttagttaacagtcatttttttatattaattgaataccaattttgtgcctaacactgttctaaggaatggggatacagcagtgaacaaaacaggccaaaaaccccacaaaactctgccttatggagcttacattctagtagagaaaggcagaaaataaacaggtaatactatatagtatatcagatagggccattatggagaaaaataaaacaaataagagaatatacaatacaaagggtaggagtagagattctaatttcaaatagggtggtcagaaaggatctcactaagtgatttttgagaaaggcctgaagagggtgaggaagcaagttgtgcaaataaccatgagaagagcgttcaggcagaggggagagagcaaattgaaagatcctgaggccaggcaagcctagaatatctgagggatgtcagcgggaccagggtggctggaacagaatgagagaaacagaggagatgagcgtacaaaagtagcggtgggggcagattgtaaggagtcccttttaggcagtcgtgaggagtctggctttggtctgagtaagatagaaagtcactggagggctttaagcagaggagtggtgtcattttaatttttcaaaactcacactggcttctctgttaagaataaactatgagatgacaaaaggtggaagcagggagatcagttagcaaactaccacactaagtgaggcaagagaaaatggtggctggtgccaaagcagtgttggagatgctgagaagtgacagtgttttggatataatgttttaataacttgctgatctgttggatgtgggctgtgagagaagcagagaaatcgaagatggcttcaaggttatgagaaggatggaattaccatttacggaagtgtggaagattttaagaggagagagtttgggagtggtgatgggaataagtggagaggttggagtgtttggaattttaatatttgatatgcttatttgattccaagtagaggttatcagtaactgaatattcaaaatctagagtttggggaaataactggaaatggaattgtaggagtcattggtacatgaaatatgggtgagctccccaacgccctgtagtttgtgtgtacttgttttatgactgtccttcttgtatgtacagatctggcagacctaactttggctctatgggcgtagagagaagatggatgacaaactatctgaggctatggcagctgggagtggagaagatatactgaagccatggcttcagacagtttgtcatctcctaattcctttgaagaatcatctgccattgacttcctgttcccagatttctggctcaatcctggtctctcagtctcgtaagatcctaatacaagtctaggttgaagttcagattatcaagaattagcagtaataaagccagtgagttcagaagggcagggtagctggaaagtgttgctacttcccacccctaacctccaggtgattgtgaggacttctgcttttattgagtgacacgaaaagtaattggaaggttttgagcagaggggagacatcatcttacgtaagtgggaagggtgacatagctgcagtgagggaggttattcttctatcagtatctctagcaaatcaagtagtaatctggtggggaataacttcattcctagacatatgccctcacattcattaaatctgtggccttcaaaatatgttcaataacgaaatggatgactggaacactagtcaccatgtaaaactttttccacggaaaaataaataaattttgagattataatagtcaagctttcaaaatattaaatgttaatatattaaattaaaagttagtaagtctctggtttgtgtattccacaaaaatctttagtatactagccacaagctacatttacgtgcacaaggcttcacactgatgttttgttgcatgactttctctgtgaatattgtctgtaaatataagaaattcagtaagaattgtctttttttctacctaagatatatgttcatgttcttgctgagaaaatgtatggaagtaaaattaactaaaagagcatatatgttccagattggaagtgataatgtagtaaatattgtcttttatattccacaaacaggaagagtaattcttcatctaaagccacgacaatgagtgaaaatgtgagtatctttaaagcatatttatagaatgaatatgtttggggaatagggcagggaaatgaagtaattatatggactttgtgaattttcacttttaatacactttgcaccagtgtctatcactggtgtttaaaaggagctaagtagatgttagcttctgtaccctgtctaggatggcatgataaagatacctggcatttccaatagcagaagtgatctttaatcatatcattatttgtttcatggtattttctataattagtctgccttcttagtatcactaggtctggcattatcagctccctttgacagatgagtaaattaaaacacaggttcttacagggtaacagtggtggagctgggacccaggctcttttcttccctgtagcttgaccaagcagagtggttccagcagagctgtggttctaggactcacctttggttatgtgaagcacttggaacattttagggctatgcaatgtcttagtcatttgggctgctataacaaaaataccatacactgggtaatttacaaacaacaaatttattttcagttttggaggccaggaagtccacaatcaaggcaccagtagactcaatgtctagtgagagcctgttcctcatagatggagacttcctgctgtgtcctcacatagtagcaggggcaaaacaagcaccctctggcctctttggtacgggcactagctccattcatgaaggtcctgccctcatcacctaatcacctcctaaaggccccacctcttaatagtattgcattagggattaggtttcaacatatgaattttgggtgacacaaacattcagaccagagcacagaatatcctgttataattgaaaggaacatttcagaaatgtttgaaaagacgcagtaattacctaactcagaggttttaaggaacataatttagacacttggaccctttgtaaacactacattgatgcagcaaataccattgttactcagattttgtagctctttggatggatattcagccttctggatgattttctcaggaatatagtgggttggggcagggggagttcctatggttttagaggcctaagtcgtttcttgagaaacaaagcatgggttctcagaaatgctttactcatctatggcaggaattctgtcagatttcttctcagtagagtctggggggtggggtggggcgggggagcctggacatcagtattttaaatgcttacccacttttctgtaaaaatttgattttcaaaaactgttccagaaactattacagaattcaccttattttgtggtttactacactgaaagcttactgatgtttaattaggggacaagaaactttgttcccaccatttttgtgcctacaatttatggaaagtctttgtttctgcaatttacagaaagtactcttggagtgtggaatcgaatactcccatccctccaaacagtatgaagcacattgtggctaaactgaatgaacaaaagccatttattttttctttgccttcctctcagttgcccttatcaactaacagctagagtccccttcagttctcttgtgccctaccacagggtttctcaacctcagcactactgatattttgggccacatcattctttggtgtaaggtgctgtcctgtacatcataggatgtgtagccacaggcctggcctccaacaccagatgccggggcatcctcctaacaggatttgtctgcctctgccttccagtcctacctctttactctctaggcaaagcttcagagtaccttgtctgctaggagttagttagttaattccccataaaacaagtttaattaaatatatactggttttggccaggtgcagtggctcacgcctgtaatcccagcactttggaaggccgcggcgggcggatcacgaggtcaggagttctagaccagtctggccaatatggtgaaaccccatctctactaaaatacaaaaattagctgggcatggtggcatgtgcctgcagttccagctgcttgggagacaggagaatcacttgaacccgggaggcggaggttgcagtgagctgagatcacgccactgcagtccagcctgggtaacagagcaagattccatctcaaaaaataaaataaataaataaataaatactggtttttacctgtagaattcttacaataaatatagcttgatattcataagatttatgtttctttaaatatgaattcatatatttaaacctgttttttctttcttttcctaggatttcaagcacacaaaatcctttataatttaaagactccactttagagatacaccaaagccaccgttgttacacaagttattaaactattataaaactctgctttgtccgacatttgcaaagaggtacacgaggaaatggaattggtatttcattttaattttcatgactactaactcacctgaacttgctattttaaacaaatagttctgtcgacacctaaaatataatctggcttcttgtgtctggactaagttaaaagaattaaaatactttgtaatgtcctgggctttgggaaatgttaaccacgtcctaacttctagagaacgttactaaaatataacatactgattgtgaagtcaatccacaggtcatgaaaatataaatcagactctgcacgagagtctgatttagggggtccaacaaatactctgacagatgcaaaaggaacctctggtctcatttctgccagaatcctcttttctcccctaatatcatccttattctgatgctcgttcatcactaacacacccacagaaaggaggaagcgggatgggtcttatgcccaaggatttgcactttgtgtttacttccattcctgggaactaaaagcaacatcaaaagaaatgcctaatggctggagcccacaggtgtgcaccacaggatttgcctggtgtgtgtcactgatttcttcattaaacgtaatttagatggtcaaacacaaacccaagtggcttatttcacccctactgctgcttgccactgcttccttcttgtaagatttctttgaagaggatcagtgactttgacatcagaactcaccactggagcctacacaagtttgcagatacctttccctgcaggagtggtgacttcacatctttctgtctctaaaaattgtgcagtgacattccgggccaagtcccttagtcaggggttgacaattctgcttttggacaaggagggatgtggagggaagaagtaatagtctaccaggaaaatgagacgaaaaagctcagtatgactccctgcatctggtacccctcttgaaacacagtgggcacatgagcaatggctcaaacgaaaagtggatctaatgtgggtttctcaaccgatgaaccacaaaagcttccagctactattacaatgtgaaaattccaatgatccgtttaccagagcaattagactatgttaaaaattcatatcatttgtaacttcttttaattactgaattgatattaaaaacaaaatatggctagggcatgtcctattcttctgggcaaatgtggatgaaaaggtcacttgctacctttgacaactatgaacatgatggttaatcttctttctttttttttttttttttttgagacggagtctcactctgtcgcccaggctggagtacagtggcacaatcttggctcactgcaacctccgcctcccctccgcctcccagattcaagcacttctcctgcctcagcctcccaagtagctgagattataggcgtgtaccaccacacctggctaatttttgtattttagtagagaagggtttcaccatgttggccaggctggtctcaaacctctgacctcaaatgatccacccccatcagcctcccaaagtgctgggattataggcatgagccactgcactgggcaggttaatcttctttcaaaagagtctgctctttctacccaattggcgaagcaaatccccaggattcaccgaacaaatggattaagcacccactgagtgcctagcatgtgcctggacaccaggccaccgggaagatgctccccctttgacttgtctatgacatgctatgtctctcaccagatcccttcctggaggtcgggcttctgtaacatggctctgcccccaaaataaaattttcaccacgagtcagggatcggcaaacattttctgtaaagagccagaaagtagatattttaagtcataaggtccctgttaacaactacttgactctgccattgtagcacaaaggcagccacagacaaaacaagcaagtagtcatgtctgtgttccaataagactttatttacaaaaacagcaggcacagacaagatttggcccacaggcatagattcccaactcatggtggtgaagtacagaaaaaaacacctgtctacaagcttttgtaagaaatcaggctaaatgttacctatgttttggttggaagatttctttggtttgaggaatgctttcctcttgcattggcatgccaagaggatagatgactctgaaagacgcctcttcagacatacctgtcatcacacaagatcaacttcttcagtttaaatgacacaaatccatattgtggaaggaaaatatgtagtgccttagcttcactaatagttgtaaaacttctttttaagacatcaaaggctagaggattcattttatgcagtgcgaacatctaataacactctctgtgtcaaatatatattgtacattaccttaaactattgtaatagctaggtaaaaatccttgtataaaagaatgttttcccccacacaaagggcagagtattgagcactaatttcctattaaaagtatatatatgtatctgtgggtcactggtgtccagacttgtatttgcatttgtgtttacttgaggaacttgaacactaacaactggtaaaatcccattgtaattcttacagcattttgactttattttcctgcagtgaattgtgttgtgtaaagattagggctttaaaatcttattagcaagctttgttttgttttaattattgttgctgttgtaactagatttaatttatttttagttggaggtttgacctaagtctggaccaattgattgcttttcaatacaactttgcaaagaacttcctttttccacaggtggctttgttcgattaaagtctacactaataaaaatagctgaacttgttaaactttttagccccatataacagtgcagggaaagagtcatccacctattgttattcataaaacccaggaaactacaccctcttaccttctgtagctacaaggctagctgctggttagctgcttaagattagaatgtcatcatctctggatggctgccaacttctcaaatgctgagaaaaatgctctgaaaataaaaagcaacaactatttattgaacactttatatatgtcagaggtggggatggatgggggtgaggatgtagaaaatctcattcatctcagcgatactataaagtgggtaatgtcatcattttgcagatgaggaaacaagagttactgacttgtcaagttcatggagctgaggagtgaggaatcagggtctgtggggacccagatcagtctgatccaggatgtttcacacaccatgtttttctctacccccaggctgacttccttttaaattctttgctgttattgttgagatggggttttgctctgtcacccaggctggagttcagtgccgcgatcacggcttactgcagctttgactttccaggctcaagtgattcccccagctcagcctcccaaataggtgacaccacaggtgtgtgccatgcccagttaattatttattatatttttgtagaaggggggtcttgccacgtcgccaggctggtctcaaactccttgactcaagcgctcctccctcttcggcctccgaaactgctggcattactataggcctaagcccggtccttttatttatctatttatttttaaattttatgtatttatttattttttgagacggagtctcgctctgtcgtcaggctggagtgcagtggcgcgatctcagctcattgcaacctcaagggttcaagcaattctcctgcctcagcctcccgagtagctgggactataggcgcgctccaccatgcttagctaatttttgtggttttagtagagatggggtttcaccaagttggctaggatggtctcgatctcttgaccttgtgatctgcccacctcggcctcccaaagtgctgggattacaggcgtgagccactgtgcccagccgagcccagtccttttaaattcttgtgcgcttctctgtcacactttcctttcacccccagttatctctggcccctcatcgccttcctggtctcactgccagacaaaatacctttttgtcatgcctttcccctaacccagtctaaatatcacagtgggccatttcattctcttccactctcctctcattctccgaagatgcccaaatctctaatattattttgaaaaatattgaggctaaccaggatgaatgcatttaaatcctatcaccaccactgccccctcctatctctaaatctctccatctttagcctcccatttattcactgactacatcattcattgtcttatttgattcttcagtcactactttcatccttttatctcaggctttcaatagcatctcaacgtttatctccgggaacttccaccctccagtaccctctcagtcacaacgtcaatctctccagttccaaaggctccttttccctctaatctcttcttccccccaccccatccatcaatttgccccatttctctcgaaccatgtcaactcccttctcctttcccctggctaaaccctttcactcttcctttacctagtctatcacaaaatctaaactcctcagcctggaattcaaggtttcccacccatcacagacatatcccatcatattgccacagcctacgtattcagctatatgttctactaacttcttcggttgcctcatgtacccattaaactgagctatggtcattttatcttaacccatttccccctcctctatacacttacctataacaccctatccacctggaatgttaattctcctaaccacaagacttgtatattctatctacttattaagagacaggtcaaattccaccccctctaggacagccttctctcatttcccctgctggaaactctttcttctctgaatttccgtaacccttgattcacttactggtttctaccccataataggaatgaacatgtttgacacccctaccaatctggaagcattttgagaaaagaaccatgttttacacaactttataagacccaaagaatttaacagcatctaacgtggttggtatttaatgtgataaatgaatttttaaaaatcaaaggaacacttgtcaaagagcaaatttagtatttaactataaaatttccccataaatttagttcaaatattaataaatgattgtattctgaaatatgtaattataatagttatctaatatgtgaagttacaaagttgttccatgaatgaaggctggatggaaactatttttctcataccagtcttttagcaattagacatgaatttccacacagttcttaagaagctcttcaaatatttttccaactttcaaattttaaaatttaatttttcatcttttgttttctctttttggaacacttttagtgttaacagttggttaagaaattcaaggtaaactaaaagctttcatttgtgatactttcaatatttgtttacttttcaatatatgctaagtttttacttgaccaggtttgaaaaaatgtactaattaagacaaactggagtgtaaaatgtctttttactttccaccaagaaaatgctctcaaaacaagttaagtgtgtgtcaacaaaggacctgtttaccttctttgagattgaaagcaggctgtttcaaagctccatttcatgatcctttattttcaacttcaagtgtgctatttataaagtttcttaaagatggtataaaaatagagatttaccaagagctatagttggagtcctaaagttgcttatggtttttttttttttttttgaaatgcagtctcgctctgtcacccaggctggagtgccgtggcgcaaacttggttcactgcagcctcctgggttcacgtaagtctcgtgcctcagcctcctgagtagctaggattaccggcaccggccaacatgcctggctaatttttgtatttttagtagagacagggtttcaccatgttggccaggctgatcttgaactcctgacctcagtgatctgcctacctcggcctcccaaagtgctgggattacaggtgtgagccactgcgcccagccaacttcttaatttctcattctcaaactttctttccaaatatttactatggaatttaactactgctgaattgaagttactgtaggttaagaaacattttctttctaaattttaggataatatataccaaagagaatgaataaaagttttacaaagacgctatgttcatataacaggatgttaattgggactttctctgttgcctaaagactagaaacaagtatctcactttctagggaaaatgaaggctggacgcagtggctcacacctgtaatcccagcactttgggaggctgaggtgggaggatcattggaatctagaagttcgagaacagcatgggtgacgtagtgagactgtctcaaaaaactgaaaaactagctgggtgtggtgacatgcacctgtagtcccagctactcgggaggctgagacaggaggatcacttgagcccagaaggttgaggctgcagtgagctgtgatcacaccactgcaactctagcctgggcaaaagagtgacaccttgtttcaagaaaagaaaagaaaaaaaaaaagaaaagaaaaaatacattgggtataaataccccttcactgttgatgaagagacagccaccctgaaataattactccagtccaccactactctttacccttcacctcatcacacagtccatataagctgaagtgtgtatggatggatttgggatgggaaggaacgaggggatggaaagagacagagaatgagtttgccaaagtcataaggagtactattcccccaggtcacccccaaaggaagtaaagagaatatttaagacatcacttgcaaaaactgaaggcacctgccaaggaaataggagctatttgagccagtggaaagggagctggaaaaaaatatcaagaagagggggagggccaggcgtggtagtgcatgcctgtagcctgtagccactctggaggctgaactggggggattgcttaagcccaggagttcaaggctgcagtgagctatgatcaagccactgcctgggcaacagaacaaaagcccatctcttaaaaaaaaggagagcgaaaaaaatttgccaggcatggtggcgggtgcctgtagtcccagctactcgggaggctgaggcaggagaatggcgtgaacccgggtggtggagcttgcagtgagccgagatcgcgccactgcactccagcctgggcaacagagcaagactccatctcaaaaaaaaaaaaaaagagcaaagtaggggaggatggtgaaatatacctgttttcccaagatttcttaggtcaaggacatgagtgtcccgtggatccagtaggcaccattggaagtagttggcgttcagccttcttgccagtgtctcaccagaccaaacattggaaacagtgtgtacttaccattccagtgggagctaaggggtgtttggaagggagttggcatgaacctgccatttaagggaatggaatctgtacaactgggaagacctcagccacagggccccgcaagaactcatacatgcaccttactagagagctagcatttggaaggctgctacaccaggagcagcaacaatcagagaaatagtaaaaaacaaacaaaaaagcctacactaaatgttaaataagtaaaaattgcctagccttcctgggttactattaaaggtagtgctatgtaagtaacagacacatgtccctttctagttccccttacctctcctcaactcaaatttcctcttcgtataaggacaccagtcagataggattaagacctaccctaaaggtctcattttaacttaaagtccctgtctccaaagtcacattatgaggtattggaggttgggcttcaattcaatcaaagtatgaattttggggaaacacaattcttcataacaccaggcaaggggtaaaatagccattttaaataaccacaaggctgagatcatttgtcataatcacataaggtggttctgaatggttaagtgcaggacaaggagtgacctggcaggctgaagtgctgcacaaaggccagcatttgcagggttggagcagcctagccaaaaagaggaaggggctctgaggaagacgaagccttggttaagatctgtgactcacagcaccacgagaggttcagttggaaaacagggagtgcttgcctgaccaaaatttaaatgtaaatgcacagccctgtaatatagggcacgagaataggatgcttcttacagtcaaacagaaccctgtttcaataatgaacaaagagactgggacatgcaagcaattccacagttgtgagacaagtaaaaaatgtgttatgagataactgtgttagctgataaaaggtaaaattcaactaaactttgaatgaagaaggaggtaaagagacagggagaggaagcatatgcagaaaaggtcagtttgttctctactgactggcagttccagctgacacaagatggctttgcagccacaggtaggtggaggagagctgtttcaggggaggttaaaggaagaccctgggacaactagacttcctcgattacctttagatagtgccataattagacacccgattctctgttccaaagcctgcaattatttaaataaaagtagttcaactgttctgtcactgcttagccacatttgaagaaaagtgggctgtttcttcctactgtactgccctccccaattccgtctctacacatcgtattaatcatatctatgtcattaggaaatatttgtagatctttcaaaaaggtattccctagcaggttttgccttcagctacagtatgccataataaaaatctattccctttggcccaggcgcagtggctcaagcccgtaatcccaacactttgggaggccgaggtgggtggatcacctgaggtcaggagtttgagactagcctggccaacatggtgaaaccctgtctctactaaaaatacaaaaattagccgggcatggtggcgcacacctgtaatcccagctacccaggaggctgaggcaggagaattgcttgaacctgggcaacagagcgagactccatctccaaaaaaaaaaaaagaacactgttggcttcacacttttacacttttaaagaaaatcttaaaaatctattaaagacctatatttattaacacatatcagagatattgtcaaatactaaaaagacatggctgcttttcctttaaaatttactttttttaagcctgattttgaccattaaaatattttttaaaataacttccttgagagacagttatagtcactaaaattttgaccatgtctgatatgccacttatctagaatgtatctgctggaactcttcttattaggacaaaacaacaccataaagtttactcttttaaagtaagttcctttatagaacccccgtcatccctacctttccctcatcaatctgaacagaactgtaacagactctgtgatctgcaagcaaagatgagggacctgggttactgggagaaaattatttaacatttgaggagatcaaagttaaacacaatagatgttccaagacatataaaaaattacactcagatttctgagaaagctatgaccaagaatttataaaccatttcttcatgttctaaaggaagggtaacatccctccacaacaagcagggttatgtgcaagttgtgtccagttcatccaaggtctccatctgctttattataaccaaatgaaaggatctaaaaacaactctaacacacagaactcaattcatcaagaacacactcaacatcaccaaataatttatttggactcagaattaaaagaacatttgacagttatgaaatgcatgtttattctgaaacttctaactagttgtacaactaatccgtgacaaattaccagattaattttactttatttcttcaggcctggggtttttcgatgacttcaaatttgggatctaagaagagggggaaaaaagggtcaagcttagccaaattgcaataaaatggattatgtagaatgctcaagatttaactcatcaattttctgatttttttagtaaacactgtttgtaaacatttacatagaaatatagctaaacatttatgcaacactttctatgagccatgcattccattaattgactttgcatatattatgtcatttaactacatatgcagaagatactataattctccccaaatgtcagatgaggagacatgcaccagttaattactcaagattacacagctgaaagtgattataaggattcaagattgggcagttcgatttcagatccccaccatttaatcactatgttatgtgatctcctatactgctcttattctaacagcaaacatttagccggcagcttctcaggcacacgtcatggtcctaataaattcacatgtcaacactgtcattcagttctctaaaaatccaggtaagtgtaaatattcttcacttatcccccacaagaatgaatctgtgatttataagacgtaccttcaaatttgaaggtgggaaatgtattcatgtctgcattaccaaacatttgcttgagcttaaaaagctccctctccagctcttgctgatactctgaactagcatcaacaggtcctccagatgtcctgttaagtaaatgagcaaacaaaaattaattttgtgtactagcttacaaaaacaaaattacttttcaccaccacattccaacagatctttttttttttttcttttttgagacggagtcttgcttggtcgccaggctggagtgcggtagcatgatcttggctctctgcaacctccgactccctggttcaagcgattctcctgtctcagcctcccaagtaactgggattacaggcacacgccaccatgcccagctaatttttgtatttttagtagagagggggtttcaccatgttaaccaggatggtctcgatctcctgacctcatgatccgcccgcctcggcctcccataagtgctcggattacaggcgtgagccaccacacccggccaatagacctttttaaagcattcatgtagtcaaagaaaagacttcagaaagaaaataagtatttctacttcaatttcaattcaaactattttattacgatgaggtttcacataaatgaggtatcctcaaaccaatctctaacattcaaggtttctcagaatcacggacactcactaagtcagaatttctcagggtctaagttgcaaaaggtgtatcgttaagtctacaggctctggagtcaaagactggtcctgtttgagtgtaagttcaactattcagcaactgcgtaaacctgagtaaggcacagagcactctaaattttagtttccacaactaaatatgaaggttctaccaaacgagggtgtaaatgcacacgtacctctaagcacagtgcctggcacacagtgagtactcaattattatctactaatatcatctgctttaagtcagccatcactaaatggcttttaaagaccttagacttttaagtttctaccataggggtcctattaaagaagcaaattatttcctaccctcagagattttgcaatttcgaagaaaaaaattacatgtttacaaacatttatgctgtaaaggagtgatgtgatgagcttcaaagacatgatttaacaaaaagctattcaagttgaggaagagattacttttgctaagctaatcagggaaaatttcattttaaaaaggtggcatttgagaaacatcaggcatctggggccagggtttattttgagaccttctaagatggaaaaagcaaagacatagaggtggtaagggattggctgtatgtggggaatgctaaggagtctagatggaaaaaccagcagaccccagatcatgggaggcccggaatgttaagcctgggagtttgtattttatttgccaagcaataaaatgacaaaattagacttgtgcattttgggaaaataaatatagcattatggaccagcagcagggccaactgggtctcattaattctttgaagaaattcttctgtttttgtcataaatactactgcctacctagcaatgaacaatattctaaatgtaaaaaaatgtacacatgaaaattccttcaagggtaataacatttttacacatgcctatgatcaaagtatacagtcttatttaagttaaagaacatgcacaaaaaatacataggtggctccaatttaagaacttgttatcaatatttcttgttagagacccaattttcttttagattagcactgtccaatagacctttttgtgatgttagaaacgctctctgtctgtgctgtccagtgtggcagccactagccatatctggctattgagcactagaaatatagctaacatgaatgagaaaatgagaaactgaatttataaatacacttaattgtaattagaatttgaatagtctcatggataacggcaaccaaaatggacactgcggttctaaatagatccttcaactagatactctaatactggttacagatggatgatggctattttaactttaatatgcactcttgtgataaaaagaggccagaaatcatctacctcctcaactgaatgtaagtcttgctgcttatcttgcttattactatattcctaggctctcacatgatgcctaggacaaagcagtcactcagaagatacttgttcatttcactagcaaatactaggcatgctaatgtattgaataatttaatttttataatatcctatgaaatgggtaagtactaccatcatcctccttttacatatgagaaaactgtcctacagaagttaaacctgcccaaggtcatagagctaattagtggcagtgctggatgccagcccagggtctaccctcagaactctccatgtgtttgtttgcacaaacgaatgaatgacccacaaacaagactccttagatatagggtacacctaagaattcacttcttactagataggcttttaaagacagttaaaatgatgcaaacagcatcaatactctaatataacaccacatttggacagaagacactcaaaattccctgacgagtcctgcacatctggttacttaacagtatgatttttggcaaattctaactttcagccttggttttctcatatataaaattggggtaacatctatagggttgttgtcagagtttcattaccatgtctacaaagcacagagtaacttactacattttaatcccttcactatttctcctcctcagttttggcaatggtaacacctttgttagttacctcgcctcaaaagtcagttttcttttattgttccctcttcttcctctccagcagctcaccaaaaccaggcatcagtgtttcaatgtcttgactctgtcacttttacattaccactgctataaagtcaaggttctcatcaactaatgcttaggttacattttgctaacatgtctgtctttgctctcttctcatttcaatccttccaataccctggttaaaattatcctcctaattcagagtaatcttccatccccacagtcatgttcaaaaagctgtaatttctcacaaatgcctaccacatatcttacttgctcagtctacaatcaaggccttccataatccctcattctaaccccataccatccttatactcttcatataccctatactccagggaaatagaattataccattcaccaaatatattttgtgctttctagcacaaactaaggcattttcatgccttagttcacaccattctttcctcctaaaagatactctcctcttaccctcatttatctgtccaaccttcatacactgatctttaaaacctagagtaaacccctgggtgtacaggtctactgaaggcctcctgtgggtttgagaactgtttcatgctataaggaaaatgatgtgagtaaattcttcacgtttttttctttaaactgggaagatgatccacagttgtccatgagattctcaagagggatgagtacccaaacactgccttccaagaagcctctaaaatgcctctagctggaaaggagtattctttcctatgaactccccaagcacccagcgtttccctaccttagcacctaactcattttaccttatattgtatttatttgcttagaagctttctactcctatcggactttaagaatattgtaaaaatgccctgtggcccatcacggttaatagccaagtgctttacacacagtagacaactatatgaaagaaaatggaactatgaattggtgcgcctcactgttcctaagatttgggtttggacctgatgacagctaaggtggtcattcctttccaaaactatggttctacaattgtttttcttggacttacattatgtcatttcagagtcttttgtcctttaatatacattctcagagatctgtaactatggaaatagccttttaaaaaaaagagctgtgtttatacatttcccccaaattacaatgtcacagaaaggccactaaattgaggctaaaatatactttgataatatatttttccccaattagttttatgatcttcggctaatcaatgtctaagggagttacttttttcaaacttagctgctaaatgatttccaagaccctatgtatttctataaattgatgtggtttataatacatgacatgacagtaagaatgtattttaaacagcaataaatttagtaggattttcccttgtaactcatataaagatacagtttctgacttaaaaaaatcaagatccttatcttcttttttgagggcacctaatgaacctctatgtcagagatgagctcagtgaaggtctaatactttcaaataccaagtcatttttattaccaccttgaaacttacatactttgaatatttatatttacactgtagttatttattcacttactgtcgcttagatttgtattctctaatcttgtccacaaagagtttctgtataggatcaagttccttattaaatgccactgctgtaacaccaatgttcctccgcaaatggactgagacggctgaccgaatgacagaggagaacctgaagagcctctgaagaatcatgctgattctgttacagaaaacaagcagcagaaacgttaatatacttattataaatcacctctaaatatatcatgagaatcaaattctactaattgctacagaattacatcatatcagatctcagtctatacctgaccacagttcccttctcctccttattccccattgcaagttttttaggtcttaaccaaaaggctctgggataatggaacagttagaaactcaggcctgaagcttcatcagggttagagcacaaaatgtgaggtgaggtatttcttcccccttgaacttagtcatggatcagagaaaacagtagaggtagactgttgcaacactgtccgctcctaacaggaaaagtacactggcccccaaactaatgtacaaggtttcccatacctcagccgggcatgacaacctgaaaatgtgtacttcacaggcccacagagggagaaactgctctgcctgttacaaatggattccagccatttaagaatactgtaacaactaaatcaaagtccagaagaaccagcaaagaaaaacagcagccagtccaaatgagctgtgcatgacagtggggaggatccggcagtccaactttatcagtgaaataaattggtgaaggagatggaagtctgaattttaaaaataaggacttatggccaggtgcagtggttcacgcctgtaatcccagcactttgggaggctgaggctggtggatcacctgaggttgggaatttgagaccagcctgaccaacaaaaagaaaccctgtctctattaaaaatacaaaaattagctgggcgtggtggcgcatgcctgtaatcccagctactcaggaggctgaggcaggagaattgcttgaacccaggaggcagaggatgcagtgagccgagattgtgccattgcactccagcctgggcaacaagagcaagactccgtctcacaaaaaaaaaaaaaaaaaaaaaaaaaaaaaaaaaaaaaaagacttaaagactttcaaatccctagacttccttaagctaaaatatattactttctaactaaaacatttcagtagaggacaattcctgttgagatttactttagtgatttaaagatcaaatgcaaaaaataatccaaattacaacaaataggtacaaacaggaattctagaagaaaaggaataaagagggccaggcacggtggctcatgtgtgtaatcccagcacttcagcccgaggcaggtggatcacttgaggtcagaggttcgagaccagcctgcccaaaatggtgaaaccctgtctccactaaacatacaaaaataagtcaggcgtgctagcgcgtgcctgtaatcccagttatttgggaggctgaggcaggagaatcacttgaactcaggaggcggaggctgcagtgagcccagatcacaccactgcactccagcctggatgcagggcaagactctgtctcaaaaagaaaaaaaaggaaatgattaaaagagaccataaataattagtagaatacatttttctcagattaaggccgagtctataaactgacagggcttgccaaaccccatattggaacggtgacaaaaggctcacaatgcaccacagcctggtacaatttctcaatctttttttttttcagacagggtctcactctgttgcccagaatgaacacggctcactacagcctcagcctcctggactcatgcaatcctcccaccttagcctcccaagtagatgggagcacagttgtgtgccatcacaccaggctaatttttactttttttttttttttgtagagacgaggtcttgccatattgccctggctggtaaaatttctgaatcttcaagtgaaaatctgatatgctaacatgtttcccatgccctccccaaatttcctaatagcaatactgtcatcatcacattgacaccggacttctactaagttataataggactagtggaagtatacaaactatgttattggtctaaagtaatatagaaattagatataagtatttagaggccaggcgaggtggctcatgcctgtaatcccagcactttgggaggccgaggagggaggattgtttgaactcaggagttcaagaccagcctgggaaacatggagagaacctgtctctaaaaaattagagcttgtattttaagtgacttcattgttttgttttttaaatttcatttcttttgtaattcattttcactgtattcaaaagtgtccacaggagtgggtgtgagaatggccctttaccactcagagtttgagcagcactagctagaaaactgtagagtcgcacaatagttctcaaaatagggttgggggtgggggaagaagtgagtttttttctctccaaggagacatctggcaatgtctttagacatttttggttgttctcaccaagctgagtgctactggcttataatgagtacaaagccaggaatgctgccaaacactataacgacaataacagccctcccacccctaagaattatctggtcaaaatgtcaataatgccaaggttgacaaactctggaatggcatgtaaaaattatcaaaagaaatctacaatgagccaggtgcagcggatcatgcctgtaatcccagcactttggaagaacaaggcaggaggatcacttaagcccaggaattcaagaccagcctgggcaacacagtatgaccccatctctacagaaaaaaaaaaaatagccaagtgcggtggtgggtgcctgtagtcccaggtacttgggaggctgaggctggaggatcacttgagcttgggaggtagaagctgcagtgagctgtgattgcaccactgcattccagcctgtgttacagagtgaaaccctgtctcaaaaaaaaaaaaaaagaaagaaagaaatcctacaatcaggccgggcgtgatggctcacgcctgtaatcccagcactttgttgtaatcccagcactttgggaggccaaggtgggtggatcacctgaggtagggattcaagatcagcctgaccaacatggagaaaccccgtctctaccaaaaatacaaaattagccgggagtggtggcacatgcctgtaatcccagctactcaggaggctgaggcaggagattccttgaacccaggaggcggaggttgcggtgagccgagatcgcgccactgcactcctccaccctgggcaacaagagtgaaactctgtctcaaaaaaaaaaaaaaaaaaaaaaaaaaagaaatcctactatcaatgcaatcaacaaaatatgcttcacctgacagaatgaaagcaaactgtttgaagaaattaaagaattcataacatatcacttttataccccatcagggaaaaatacttgagaaaaggctacaagcaaacaacaaatgacctcacaaggtcatgtgccacttattatcattcctatgtttaaacacacagaaactgaggattagaagtatctggtcaaagtggtcgggcgcggtggctcacgcttgtaatcccagcactttgggaggccgaggcgggcagatcacgaggtcaggagatcgagaccatcctggctaacacggtgaaacccggtctctactgaaaaatacaaaaaattagccaggcgtggtggcgggcacctgtagtcccagctactccggaggctgaggcagaagggcgtaaacctggaaagtggagcttggagtgagcagagatcgtgccactgcaatccagcctgggcgacagagcgagactctgtctcaaaaaaaaagtatctggtcaaagttacacagcaaaatctaacttaacacatatatgcaaaaaaaaaaattgtgcaattcaatgccactttcccttctggcaaactaaggacatgcttaacattcagcaataggttcacccgacatttgcttagccctagatactgtgcaaagtacttccatatatatcctttccttgtacccttacagcaatactctcaaagagttaaagtgttcttatccctgctttacagatgataaaactgtatctaagaaagattaagctgcacgtattctcacagttaatttgctctaagtctgactgcatagatgttactccttctgcaacacgggtaaaatccactttcattgtttcaattatccaccatgtaagtgcctatgattccccaatcgcatttctaattttagtattcatcctgagccccaaatctatccacagcattcaacagttctcatctcccttataagtcctacgaactcatccaaaaaacgaacacataatcccatatcaaaacttgttccttctcctttaatccctttcattttttttcactgattagtgaatgcatattgtccactaaaacgcagaagatagtcattacacaaatagctgtgaaataccacctgacataaattctctattccagtaccatcgggtgccacgagagcatatgatagcgtctgacatgatcagaaagactggggaaggcaacagtaagaaaacactagtctgagcagaggccttgttctgggtgggagcatggttctatttatagtgatgactgaccggccaaaggttagtaggttcgctgcctcttcagtgcatattcctatgaacaatccataaagtcgcctaatgaagtgttagcaccatcgtttttaggtgggatgcaaactttcaatattatgactaattttttccctcttaatggtacacgttctgcctaagtagcctagacgctcccgtgcgcccggggcgggtaggcctggccgaaaatctctcccgcgcgcctgaccttgggttgccccagccaggctgcgggcccgagacccccgggcctccctgccccccgcgccgccccgatttgccctcagagagggtatcgatcttatttctgggtctacggcaaactccaaggtctacaaacgtagaggtcagctgtgaccccgggccaggccgtgaaggtccccaggacacagagctgctctctcctcctagtaaaggtgagaggcagcccaggcctcgtgaaaaaacccagaactggagtcccaaaaggccacgctgatctagctaccctcccagtcaccttgcactcagtcccgagctgccaaagcctccgccgccaccacctccgctctacttccggccctggctccgcccccacacgcctacccgccatcgcaatgcattatgggccgccgtttcagtcggtcgacgctcaccggacaggaagcgtctcggagacagtctgcgaccggacgggtctaggtgagacagaagccaaacaggaggaggaagtggagggtaagtgcttccgggtcccctggcacagcctccgccatcttttcttcgcctaatttgacccgttctttttcccctccttgaaaccttgctctgtacgcatgcgctctttgagtggcctttcccctagttcaagctcccctccgagtcagcgtcctgttcgttagggttatcgaagtgtataaaggtgcagggaaagtgagactgtgtaaaacaaagcggattggggcgttgtgcttccttgtacctcgtgagcctccgttgccttgggcggtcgttttgcgcaccctgccgggagttgtagtcctggacccgaaggtgcctgggaggcgggaggggggttggggcttctcagcgccgattccgcgggaagggccctgggacctcacacttctagtcgcgggagctgcaggtcttacccggagagacgctgcacgtggagccctcgccgctgccgttctcagccggctctggagtgcgggcgggggcgacagggccgattccggagtgggtgagtgcggccgccggggaggaggggagcgcgggccctcgcgggccggcctcgttccggggccttttcccccacaagggcccccccgcggccgcctctgtgttttgtttccgctggtccccggcgctgtgactcccatttccgttcgtggagacttgagggagccgggtggggaggggcgggagagctgtgcggggagcgaaggggaggggcggggggcgagcggcctggagcccggggggaccgggcaccgccgggacccgtgccggacgggtcgcctgtcgccgctccctcctttccgcgtcccctcctcgcccgtccgcactcctcagcagtctcagcctgctcagctgggatgtggtcctgacgcccccgagattttaagagcaaaatgcagaccctgtctcatcgcgggactcagcgattcactcatttcaaatccgctctctttatagaacaacacacaccagaatcatttatcagcgtatatggtagccatctgggtttgtttttttgtttttaagcaaggaagtaaaccaaggagataacaatgggttgtctacttggaaatttttttgtgtactagaagacacgctgtatgtgcgtgtttggatttagggaccccagtttgatcaggttagcggaccgagaggacaatgcctaatattgcattgcaagatgattagaaatttagaaataaaattcatttcataagtagtttccactaatagcagtaggtctgactcgtgagaagagcaaagatttagcaggattcacttgagcgaattgtagaacgaggcggtgataacattcttcggtagtgttatcttgaacttcagaagaaaccgctcaactctttagcaactgcttgagggactagcctgtctctcagggttccatccaggctttccaagcttctttatttttagacatacagtgacgctgagtggacttcaagtcaattttacctgaattgtgtatacaagagcatctgtcatgaggcatgtatagtaatgaagtaattaaatcatgagctagatgttaggttgaagcaaatcatcagaccgagtactaaattaaaactgttgactttagccttccctcaactctttatatataaaactccaaacctacagaagaattggggaaaaaatcatgcagtgaacacgcagatacccttcacctgagggtcccaactgttaatctttcactgtatgtgctttctctttttatattacatagatatgtatgctttgctttttcttaactgctacctttatttttgaaaataaaaatgtcttttaatttcctcagacacagaaaagcatttgataacttaggaaaatgtgcagttaatctcgcaggtacccccacactccacttataatatattgggaacaaaatgttctaagctctgtaataatgctctccaatgaaggacaattctcaaatttatctgtagtttcaaaagggaatgttacacctatctgtattttaaaagacactagccgttcccagaatttttcgttaaattcaagtttagtttgtatcccatcttgtgaaacattccgaaccccaggttggatttaatccagcagaaccagagtgtcaaagtatatgaaattgttctgtgcagttctggcgggggcagcccttagacggagaaactgcaagtaattttctctcagttttcctaagtattgacatagaagcctgaggaattggtttcagaaaaagagataagactcactcaaaaactgatatgaaagatttggactatttctcaaatctctgttttgcttctctggactaagcatagagaaccaggagagaaagaaagatttaagagactgagtaatattttttgacagatcatttaagaaactgagtaattttttttttctccaaaagggcatgggtttttgttttgttttgttttttctctatttggcactttctagggattggtctataaattttttgaaagatcataggataaatttctttgtagcaacttcctattttagtgtttatgttaggggagccccaggtgtccctgctgatacgccattagggccacttctcagcctctggctacatcataatgcttttttttctatcttgccaaagtttccagaaaatttatgttttctaattttaaaaaaattggttgtggagatgggagtggacctctttataagccctgaaaataagtgattttttttaagtgctattctgctataaacctgattctcacttttttctgtagacaacagttttttataatatatctattttgtgtggacattatttccttttaaccaatactgaaattccatagtgtatactttctccacattttctttgattaatactttcttaaaatagacacttggattggcaccagctgtcaccaataaagctgccctgaacattgtcaatcaatcctgttaaccaatttgagaatttttctggaatgcttagttagggatgaaattgctgggttataggtatgagtatgcttgatatacttttctccagaatgtctacacctgtgtgtacaccacatctccagagataggggaatcttatgtccctgctaactgctctcgttatttaattttctgacatttgccgccgccgccgccccctgcccccaacacacacatggtataaagtggtagtttcttgttttaaattgaacttttgaatgatttgaatttgggcatttctttgtatcctgagttattttggtttcccgttatgtgaatatccttttcctatgctttaactacttttctaatttgtccctttttttggttatcaaattccaggccattgtctattccatcgtcacttttgggtattggaaacatctttccattctgtagcctgtctgttgaacataaatcttgatttttatgtaatcagatttttctccttacggttatgttcttggaattttatttaagaaatctttttctatcctgagaccacaaaaatgtccccaccattttcttctgtttcatagttttgccttgtatgtttaatcctttaaggcatgtgtagttcattttatatggtgtgaaatagttcttattcatttattcaacacatattggtggagtgcctgctgaaggtagtactcttcagagtactttgtatatatttgtgaacacatattcttgccctggaagcttatgttgtccttcaaggtagatccctactcggtttccacctgttttcttcagccctcaggatgaattccacaattttacacatagcaccagttaaggaataggctttattggagaaaaggaaggcttattagaccagcatcagcaagaaaaaaaaaaaccaaaaacagagggtcttcatttcttcatcatccccaaaaaagcctgctggagcctgcgcattctgctagatatgcacgtgaacagaatctgcgcagtcggctagatgtgcttgtgaacggagcctgcgcagtctgctccatatgcatgcgtccatcccagtggagaaccttacccttttattgttcgtccttaaagggcaagcctgagagcaaccttaattacgtgggaaaaattagatcattttgtatcaggcagtctagatttgggtgccagctatttgtcagaaaaccagctaccccatagttggagatattgagaacttaggagagttatagccctttctaaagtgggaagggagactcagtttcttaatgctagtgtaacaaattatgcaaatttagtggcttaaaaacaccacctgtttattatcttacagttttggagtcagaaatatgaagtaggtctctgggctaaaatgaggtgttgccagtgctgtttttctagagccttcgagggagaatccgttccttgtctagctttcagaagctacctgcattccttggctcaaagctcctttcctccatcttcaaagccagtcacagctaaccggcagatcttcacattgaatcactctggctctctcttccaatttcctcttctacttttaaggaccttctacttttatttatttgtttcaagagatagggtctcgctgttgcccaggagggagtgcagtggcacgatcatcattgactgcagcctcgactcctggtctcaagcgatcttctcacttcagcctcccaagtagctaggacaacagttgcacaccaccatgcctggctaattttaaaaatgtttttataggagacaggttctttttatgttgcccaggctggtcttgaactcatgggttcaaacagtcctctctcctcgatctcccagagtattaggattacaggcatgaggcaccgtatctggccctagctgcgttttaaaaacgatcacactctggccgttgtattgactgagaatagactgtgaggggacaagagtggacacagggaccccctttaggagattgttgcagtactccaggtaaggggtggtggtggctgttgtactgatatacgcaatacagagcctatatttggacaaccatggttcatccccatctggaatgatacctacttaggttgatacaccaaaactgtgacatggagccacaagtggtttagcctcacctctgaatagcgttcgtatgagatggagctcaaaataagattgctctatgcaaagcatttgaatgcagtgcctgatgctcggcgagtaatggttaatacaaatgaacatttaaattcttcatttagtgaaatcttgtaagtgggagcacaactcttttgtaaatgtcgaaataccaaatttagtggagcgttccttttaaaggtacgcctctttttagatgtggtagtacgcttagaataactactcagaaggtgctgtggactgaaagtgcgtatggaattcaaagacattcattgacctactgcgaggtagttaataacagaacctggtacttaacagtattaacacctcagacatgtccacaaagaaatatctatgtatattagctatttgtgtattctttagcatttttaaaattctaatgtttttgtatcagtggttttaagcaatagataaaaattttacatgggataattaaaaactgaagtagtggtctgtttaaaataaaaccacctctgaaaaaatcattaaaaattttctactgtgtgtaatcagggaaataatgtgcatatctgtaatttgttactttgttttgctgttttataatattcttgcatttataagagacatcatttgtaccaaatcctagctgattaatttgcatatcattgtatcagtgtgatactttgcagtaaattctgctactaaggtacaactttcagctgaataaacatagttcatctccatgttaagcttcaggtttgaatctgttattgagactgagttgctttaatatagttaacagacccttaacttaattttgaggtaacttgttgattgcaattggtcccgaaaacatctcagtaaatccagtagattaatgaagttgtcatgtcaggttaataaacaccagttttttaaaaaattagtttataaatgtcatttgtggattttctttattttatttttcaaacagggtctcttgtcgcccatactggagtgcagtggtgcgatcatggctcactgcagcctcagcctcctgggctcaggtgatcctcccacctcagcctccgaagtattaatagctgggactacaggcgcgtgccaccacgccctgctcatttttgtatttttagtagagacaggatttcgccaagttacccaggctgatttcaaactcctgggctcaagcaatctgcctgccttggcctcccaaagtcctgggattagagacatgagccaccacacccagctgattttcttctatatgtaaagactacttccccctcttctgcttggcgtttgctttttatttggattgggtctctacttcttgtgtgtcatttcgtttatgtggatagttttaaaatatcttaaaaagtcactcttgcaggactgatcctttgaaatactccagccatgactaaaagagaagcagaggagctgatagaaattgagattgatggaacagagaaagcagagtgcacagaagaaaggttggtgtttctgaatttatcattttttttcaaaatatcaatatacctaattaaaaccaggaaacaagtcatagttcttttggactgtctttttttaactgttctcagtattttagggaataatgtattgttttatttcctctgacttaatgtggttgtagctgagagggaaagacagttttaaactaatggtagtaaaagggtaaatgaaatcaaaagcaattgctttcaatagttttctcctttggggcatttgattctttattcttttcctcagcactggttgctttaatttcagaaatagtttaattcaacctgaactcatttaacaaatatttatgagtaactgttgtaaacaactaattgacaagaatatgtgaataaataagatactaatctgcccttataaaggccacgttgtatttgaggagacatacaggtatatgagtacttacgggaccagtactaagcataaaatgtagtgaaaagtgttaattcttggaataatagtggaatcatacttatttgaaaggaggacagtagtaatgagttcagaatccaggagagaacatgggtagaaatagactttgggagtcaacaagaagactgaggaaagtagtagttaatggtccctattgtactccgtgaagtaggaggtgagataataagctgaaagtaaaagggattgaaaagtactagagatctctgtggagtaacaaaggtttagaagtttctgcagtggaactggacaagataattaaggttaaggaggatactgagtattgagagtacagttgagatttaaaatcttaaatttttaatagagcttttcaacttgtttatcccagtttttccagcataagaaagagggaatgcatgcttctgtggaatttcatgtatagatatttgtgttagaaattaccccaaaattcagaaactaaaaatgcgtaacattcagccagatgcagtggctcatgcctgtagtcccaacagtttgggaggctgaggtgggcagatcacttgagcccaggagttcaagaccagcctgggcagcatggcaaaaccctgtctctacaaaacatacaaaaaaaaaaaaaaatagcctggcctggtgacatgtgcctaagtcccagctactctggaggctgaggtgagaggattgcttgagcccaggagttcaaggctgcagtgagccatgattgtgccatcgttgtgccattgcattccagctttagtgacaggacaaggtgcggtctcaaaaaaaaaaaaaaagcccaacattttttattgctcattgtttctcagagaaacctgggagcaacttacctgggtggatctgtctcgggtatttcatgagtttgcaatgaagctgtcagcccaggctgcagtcttgtaaagacttgactagggctagggtgtctgcgtccaaagtcatgcttgagactctcagcaagatgcctcagttcctcatcacatgactctctctagggctgctcatgggatggcagctggcttcccttaaagcaaatggtctgagagacagaatggcaaagtagaaagccccagtgtcttttttaagtaatctaagaagtgacatatcactttgtcttagtcttctggtcacacagtccaaccctagtacagtgctggagggaactttaaaagggcatgaatttaagaatcattggcagccctcttggagtctagcatgcatatatttatacatgcatgcacacagatggtccacaaagtctaaagtatgtactatctgaccttttgtggatagtctaggttaggcgacagattggtaattaatatgtatgacctatgtgaaggaggcagtaattgtcgttcacctaacgtagatttttgctgtgcaagaatttaggtctagtagtatgagatcatcttttttttttttttttaagagaaattggtactttagatatttgaggtcttccaaggtttaaatgatagcaataaaaactttttaaaaatgtttaatgttcagctagtataaagtagttctttaaaaatttgttttaaaagtgacatttgaatcttaagagtaattgttacaaaaaaagaaaaaactggcctgacacagtggctcatgcttgtaatcccagcactttgggaggccaaggcaggtgaatcacgaggtcaagagatcgagaccatcctggccaacatgccagtctctacaaaaaatacaaaaattagctaggcatggtggcgcatgcctgtagtcccagatactcgggaggctgaggcaggagaatcgcttgaactcgggaggcggaggttgtagtgagccaagatcgcgccactgcaccccagcctaggaacagagcgagactctgtctcaaaaaaaaaaaaaaaaaaaaacctaccaggctatagctgaagagtttggtaaaaaggcttacttaaagtttttttttaccttaacaaataacaatagtagactagtatttttaaataagcttgtttttaatcatgagggttctattttataaattttaaatgttttaagtcaagtgcaatggcacacacctgtagtcccagctacttgggaggctgaggtgggaagatcagttgagctcaggagtttgaggccggcctggtgtgaacatagggagactctctctaaaattaaaatataaataaatattttagaaaaaagtttaagctatatacattcattgaatatcatgtatgtatctcattttacttgtaatttatgtgaaaacttgacagatttttaatgcatactgtttttgacaatcacaaataagatttaaatcatatttaaattaaacatgttggaatacttaattgaattccacattcaccaattcagcaaatattacttagtatttgtctatttggccctatataaggatttgtaagagttatgtaggattacttaccaaagattttaacccttttgaattcaaagtgtgaaataatatgaaagagcactaagacagtttttaggaagaatatacattttttttttaaacgttgagctgtcctgattataaccagttgtgttcatattaaattaaagggaaagtcttttatttaacttattctatttttatatctttctttttttttatgtggggaagggaaattgactagtagagatggcatacagattttgaggagacaatgtgtcttcctttctgggtctaaaattcttcaaaataacttgaaaatgtaatgcaaatgcaaacataatgtatgtgcaatgtttatatgtgtacacatacacacatatgtatgtacatacataatgaggcatatttacaaggatgctttaaatttcaagcttagcatttctctatgaaattcagtgttcattttggcaacactagttggtgatgagcctgccacagtatctatgtagaaatgacttttcaaagaccagaaatgtgttttggtttgggattgtgtttttagcatattgttgctttgaaatccagggtaaaaaatgtaactgttagcacttacatctttaacatttagcattgtagaacaaacctacgcgccagctgaatgtgtaagccaggccatagacatcaatgaaccaataggcaatttaaagaaactgctagaaccaagactacagtgttctttggatgctcatgaaatttgtctgcaagatatccaggtaatttttatttttgtaaatttctattgcaacattttagtctgcataggaatattttttgttagccttttctttatagctatagactttatctctgtaagaagatttgacctgtattactgtaaaatttaagtgtttagaaataaaaaggtttttaagcaaagttttctccatttaaagttatattttaaatatttagtactaaaacaaatgaaacatttgttttttactttcacaaatataaaacgagaagtttaaataaattagaatcaaagcttaaatataagtagtaacagtaggaagcccattgacttttgaagctgaagtgtatttctagccagcttttaacttctcaaacgtatcatttaactaaatgatttctacatttctgttttacctttattttctctaacagtaagttttggataagaatttaaatatcaactgataggtcctggaatttattgtaaaaggattttacccatggtagtagtataatatgttatgtctgaaacatatcccgagtcatattttacagtatgttttaaagataggtagtacttttatgtatgaaaggtagcagcctaaataggattgcccatacagttttccatgaccttccttaaacatatgattaaatactagagttttatactttttttttttcttttttttgaaatggagtctcgttctgtcacccaggctttagtgcagtcgtgtagtttcgggtcactgcaacctccacctcccaggttcaaacgatcctcctgcctcagcctcctgagtagctgggactactacaggccgatgcttccacacctggctaattttcgtatttttagtagacacggggttttgctgtgttggccaggctgctcttgaactcctgatctcaagtgatccgcctgccttggcctcccaaagtgctaggattacaggtgtgagccagcgtgcctggctgagttttatactatttttatattaacttagattaatgtatattgtttcatcttctggatcgtttgatttattttattctttactccttcccctgcctgccttgtgatatgggtattctgtatattacagaacttttttattagttttttaaaaattcaaatcatcatatgctgctactatttttaataagatattgttgtacaataagttgaagtgttttaacaaaatttgtgcattttatttgccttttaaccatactttaatcttttcatttcaatataaatctagtaattggtggtgggtagggaagatagagtgcctctaaaactagggcatgtgggaaagtctagtagtgttacaaattttaggatttaaagtttttttctcttaacaatgagaggatgagttagcttagtctttttggaagaccacctcccatttaatatctgttaatgttaaatgtgaaattcctaacagttccacttcagcaaattattcctacagaaatgctcacttgggtaggtaaagatatatgcatgaagatgttcatggctttgcaaaaactgaaaacacctcaaatgttccaaaaatgagatttgatagaatagaattcgaggtagccattaaaaactggtgaacttgagctatatgggcaaggtacgttgagtgaaaaaaatacttacaaaacactctaattctctcacgtaatcttcacatcagtctttgaaatcagcatatttttagtcacattctgcagatgtagaaacagatttaaagaggttaaataatttgcccaatgtgtggctacaaaagggtatactggaatttgaacccagacctctgtggctccagaactctcttcacttgtttgagacgaaaaaacaaaaaacttttttaaaggtttatagtgaatataactcagtgtcactggactttgcctggttttgctcatatgtaaaataaaggagaatctggacttgatctcttagttgtctttcagctgtaacatttattgctttctttataacacttgacctatccaaaatgaaagtatggcctgcagattacccaggctcttccaagttctcagaaaataatagttggataaatggtaatatttataattcatattgtcatagaattcagggctagctttggatctaagggcattttgcattactccttgtccccctttcctccttaaaaaggatatgaggaccacactgacatgttcttcatgtcaatgcaaacatacatttcagtcagaagtcttgctgcttatggtaatgctgtgggctgacttgaaagctgagggaacaacagctaagttgcacttttttgaagagtgttaacacaagatcaaataccaggcttgagttttgtccttgttctggcttttagtgaacttgctaatatgttcagtacctgagagcttatactttcagagttacatttgccatagcttctaatggataataccagtgtccaccagacaaggagaaaaaaacttgacattaagacaatttttaatgaaatgtatattaatggatgaaactgtcatatttaatctatctgtctacaaggttacaaggtttttttttgttttgttttgtttttttggagatggagtcttgctgtattgcccagactgagtgcagtggcgctcactgcaacgtccgcctaccgggtctaagcaattttcatgcctcagcctcccaagtagctgggattacaggcatgcgccaccactcctagctaatttttgtatttgtgtatagacagggtttctccatgttgcccaggctggtctcgaacttcagacctcaggtgatccacctgccttggactcccaaagtgctgggattacaagtgtgagccaccatgcccagccgtacacagtttgtcttctcccctgttcaagttagattcatagtcatttgtcatgtgtttgtgccatgacgacaccatcagttgaattcttgggaatgcgagtaggacatgcagctttatgacatgcagacacagttataaattatgcaagatgattataatggaagcctgtctttaagctgatgacagaaagtgtctgaaagtcagaattaatgttttatcatcaatttgccatagtgtgaaatgcattctataaggatatatgaaggaaaaaacactaatactgaaatgatatagaattaggattcaagatattcatagctaggttaggtagtaaggtcataagtgctttaattttattaactttatgatgagagatttagagtaaacccttatcttcaatatgtagcattgattacaaggcagatatgacaagaatatgttaatatatttagataaattatcatgactaattaaacacttttacttattcatgacagatatagcattaccttctactttaaatacatttcagaatgaataattgccttttggaattatttaaaatcccaaactagactccagaggtagagaaaactgacatgacaaatttggtggtatgctgtcctcaattacttcctcagtggtgaaaatattttagattttggcaaagaattaaatatgacaagctaaataatgtgttcttataatttaattagtatgttcagtaattaagttctgtttggtacatccatttattctaaaccaaaggcaagggacttaatctaatgattgcactgaaataatcttactcattttatccatggttagctggatccagaacgaagtttatttgaccaaggagtaaaaacagatggaactgtacagcttagtgtacaggtaatttcttaccaaggtaagttacttttcatgatagttatttaaaattttagctcatgtttttctgatacaatttataagtttttaggtgttttcgatggttgtctacattacttgatatgatataatagccaaaattcatgctttgggtttagtagttttatttgacagggtgaaacagatagtacaacacattctacttagttcaatcataaaaggatatattatatggtagtaaatagcagaatcagagagagtactggaagtcagcaggttgcagctgacttcctaagagtacctcagccacactgcagaactggactgctaaggaagctgctgccctgccatgatctggaaaatacaacacctggaagctaccatggtagctgtcactttaaccatgttgcctttacagtgatccacactagtcaaaaaaatagatgtctgctggctgcgggggctcacgcctgtaatcctaccactttgggaggctgaggtgggcagatcatttgaggtcaagagtttgagaacagcctggccaacatggtgcaaccccatctctactaaaaatacagaataagctgggtgtggtggcacatgcctgtaatcccagctacttgggaggctaagacaggaaaatcacttgaacccaggaagtggaggttgcagtgagcagagattgtgtcactacactgcatcttgggcaacaagaggaaaactctgtctcaatcagtcaatcaataaaaaaatagatgttatctgcctcaatggtccccaaccttttttggcaccagggaccagtttcacagaagacagtttttccgtggattggggcaggggaattcaagcgcattacattatggtgtgctttgtatctattattactacattgtagtgtatagtgaaataattatacaactcaccataatgtagaatcagtggaagccttgagtttgtttccctgcaactagacagtttcatctggaggtgatgggagacagtgacagagtatcaggcattaaattctcataaggaacacgcaacctagatacctcgcatgtgcagctcacagtagggtttgtgctcctatgagaatttaatgctaccactgatctgacaggaagtgaagctcaggcggtaatgtgagtgaaagggagcgactgtaaatacagatgaaactttatccactcgcctgccagtcacctcctgttgtgtggtctgtggcctggggtttggggacctctgatctgcctgcttgtcctctcttaacccttttccaaatagaaggcttataccagtgattctaaagcattggtcacgcctggaaccctagctgcaaagaaatccaaccagtacagtttagcacagagagaagaatttgtaatagacatagagtcatccagtcaaccttattcattacagtattttactaaacttgtataagtacccaagttagaaaagaaaattaggaaactgtttttggtaggttgaattttagctttttaaaatttagaataatttcatctctgaacatatattgttcacaattatgtttcacaaaccacatttttcttcagactctgacaatggtagttacgtacttctgatccttaattccctcaggactgattattgggaataggaaataaattagtagtttttatctttaaaagcctagtgacctcttgatgcaagtatgtttaagaagagttcgcttaaagccattaaagtatgaaatctagatgaaggattaggaaatagattttaacaaaaaatatttttgattctgattgtttttatcatgtatatttgaaaaatgattctctttaaactacctgagaatgatagtagtagtttcttgcaatactggttttcacagaagatcgaagttgagttgtgctttttctttaagctgtactttgattgaattttgatatagattgtaatagattcagtaagaaacagaagcagttatgtaatatgacagtgtcttagagctgtcattttagtctgaggttatttcgtaaagggctaattccattttgaatagataaataaaagtatatcttatagagagtactgcacacataatgaaataactgtttttatggcataatttcttggcttaattataatttaattaggtataatcaaattataatttaatagtttaaatgtgttttaaactatccagaattaaatcaaaatcagaattttgatttaattctggatagttgaggagcctttgtattaataaattatttatttttattttttattttttccataggaattacagttcttaacacctttatactaggagcttaaaatattcaggatttgggtttttcttcatctcatttaaaatgaaatttagaatttaatggttaatttaatttagtaaatttggcataatttttaacacatctactttgtcctttaaaaagaaaaactgagtcagtaaataataattttaatttgcttagaaggattttttaaaattccaaggataggtagctgctcatttatactctgcctagtctaatttttattgtttcgtattggtaatttttatttttatttatctatttattttattgtggtaagaactggtacttctttttttctaatgatgtttataggtagggtttgtgtgtgtgtcttattttttataaaattattttaaacttgtagaaaagttgcaagactagtaaaagaattcttgaatatccttcacccagattccccaaatgttaacttttactacatttgctttattcgatgtagtttttctctaccatttgggaacatataaactaaattattttttggtgacttctgcgttttcatttagatttacaatttttttttatccactgttcaggaattgaaccaaagttaaacatccttgaaattgttaaacctgcggacactgttgaggttgttattgatccagatgcccaccatgctgaatcagaagcacatcttgttgaagaagctcaagtgataactcttgatggcacaaaacacatcacaaccatttcagatgaaacttcagaacaagtgacaagatgggctgctgcactggaaggctataggaaagaacaagaacgccttgggataccctatggtaataaaatgcataattctatattgggtagaataataggaattaagcttgacatagaagacactagggtaagttataatctattttacatgtagagttattaggatgaatgttgattttctgtatctctcttttaattgtaacgcacatttaagctcatgtggtggacaaattctgtcctgcgtgcaggaaatacaaagaagtctaaaaaatttctgctcttagggtgttgagagtgtagttgaagagagagaagatagatgaaaagagatgattgccataaaaggtaacatgtttttaaactgccagtaactcttgtagaagtatgctattggaatctcaaagagatcatagttgccctgagggaaagctgaaaagagtttattataaataagataccattgggcagagaaagacatttaagacaggaaatgttatgtgcaaagcttagacctgggggtatgcatgagtagtgagaaaatggagtggttaaggagttactctgtagcattacagaactgtttttgattgatgaaaatgataattgaaaaatgaatatggtggcaatatatggcataagttggaacaggtagagactaagtgaagggaaaacaggagcatattattatagttgtgactggatgataatgtctacattagcccagactccagatgatttctttgggagtagcaaggaaaaagtggatgaaaacagtgataggactgagcagattgacagattttatgagggtagagagggaagatacaagtattgatctaacttctcaagcttcatcttggtgactaaaacagtaataatcttgataaaaattggttccatcatcattacatatttagtgaacactaccgtacaccaggcaccatgttaaatgctgggcttaattaagatggtgcactatgaagagcatgctttcaaaagcccagttggggaagtagagaagtctggtataggaaatgtttttttcaagagaaggtggatagcacttgattttgatgtggaagtttatattcagctggaggttagccagaaaatggtttcagttatataagatttgggctggagacaaagatgttatatgagactcattcccactgaatttatatttgaagctataaaagtctacgtagtccctgatggaaagcgagaaatggaaaagaacacacaactaaaggcatatacacttgaccctgtaaacatttagggttggagaaaagggagacaagaaataactgaagagacagaaagaaagtaataacttatatgtatagtgtcactgaaattgaggggagagtttggatggtcaagactctcagatgctgctgagaaagtcaaagaatgctgactgatatctattaaatttgatgatcagaggattattcttaaatttagacagaagtaactagagttggcgagacaaaacagaattataagaaatagatatcttagaaatgggggcagatgaggaagaatgctggggtaacaaataaataatactgatcttccaagagttggcggggacctgagtgtatttgtaaatgaaacagtattgtcgggtttttgtcctttttttattttttatttttagagacaaggttgtacctggggagcagggctgatgacagaaaggctgtattgtagaaccactgttttccctaggacattttttttctttctttaaaccaaacctaaaagatacacagtaaatgagagagcttacccatggaactgaaagagagctatggaaccagacagctaatgtagaatttcagtctgtccctccgctgcccagtactgtagccactaatcacacgtcagcacttgaagtgtctctggtcaaaattaagatgggttgtaaatgtaaaaatacccattaaaagaaaaagtataaaatcttttctaattttttatattaattaccagttgaaataacatttggaacattaagttaaaataaattcattattaagatgtatttgaccaactttttaaatgtaactattagaaaatttaaaattacataatggtctgcattgtatttctgttggacagccctgatcttgataattgtagccttcagttctggatgttcttactgcattattttgataaatacctgtgttctttttgctggaactcctgttgaatctcttgagttgatctgctgcatcttttttcttgtttatttttcatcttacctatctgcactactttctgccagattttcttgtgtttttaatataacctatctgatttttaatttacaagggctcttcatttttgtttgttcctttctgtagcattctgatcttatattgccaatatcgtgttttctcctacttctctgagtatattgattatatatttttttttaacttttaaaaagctttaccgtggtatatctgtttcttgtggattctgtttttcttgtggtttttgtttgtgttgtttttaacctttcccaagtatctaattatttttgcccatcttttcatatttaagaattaatcactttaggccaggcacagtggctcatgcctgtaatcccagcactttgggaggctgaggcaggtgggtcacttgaggccaggagtttgagaccagcctggctaacatggtaaaacctgtttctactaaaaacacaaaaattagctgggcgtggtggtacatgcctgtaatcccagctacttgggaggctgaggcacaagaatctcttgaacctgggaggcggacgttgcagtgagccgaaattgcaccagtgcactccagcctgggcaacaaagtgagactccatctcgaaagaaaaaaaataagagtaaataactttaaagctaattaatgcgaagttctgaaggatttgataactatatgctgataaaacgaggcattgactatttcattaaaagaatttcaggccaggtgtgttggctcatgcctataatcccagcacgttgggaggctgaggtgagagggtttcttgaggccaggagtttgagaccagcctgggctatatagccagactgtctccaaaaaatagaaaaaagagctgggcatggtggcatacaccaatatcctaggaggctaagctgggaaaattgcttgagctctggagcttgaggctatagagagctttgatggcaccactatactccagcctgggtggcaaagcaagactgtctaaaaaaaaaaaaaaaaaaaaagggcaaagaaaagagtttcaaacgtgtcaatatttatagatctttttgcagatacctgtcagcagtagaagataggggtgagcatttggggtaggtgtgtatgtgaatactgtgttgtggaactggaaaaggaagtagagcagggaggaggtagagaaggtggagacggtctcactcttcagtttataggcttttattactgggaattgttctctcagtgtctgttcgtgtctctccccatctattaataaatgttttcccggtgtccacatgtgtggggtgcactcatttaactggccccccaaatgaaagagagaccctggaggttctaaccacaccatctactttaaatctgtctccttattttcagctttaagcctcttgctactcagaaccaccatgacttgaaccagtgaagggggttctgcaggcaggaattctctcacttcttactggcatcctccttggcaaacattttaggtcatagttttcccctcctatgccaaatcgattaccactctgcttattgtcttcaaaacattagattaaatctttcatccatgcctgtcactttgtactcatgttcctatgattttgcatcttttaaaaattcctttactgttgttttactagagtcttagagaaaggaggcagaacatgggtggacaattagttatgttaaaccagaagtcctgatatttgagaaaacaaatcagacaaattatatttttccctgagttttttttatttttaaatttttatgtgaaattaactttgtttttcttttaaaagaggtgtgtttcaggatagcttttctatttaactctgcttctgttgttttcaagtagtatagtactcacagataaggcaactttctttttcagttcttgtcgacttttacctgggccttctcctctttccttttccttggcgtccctctgctgctcacttctagttccactctgccagtttctccttactgtgggccattctcctgaaagtggttcttggctcagtttgacaaacacccaggtgctacattgcttcagccctttaaatcttaacacacactgcagctattggattgggcgaaactgctttttagcgttgctttcatcttgtcctgttgtactttgaatgcatgcttcttggctgcgctcaggttttcctatgatcagagtgggtcacacttcccttgcttccctttgctttctcctgcacacaagctaagaccatggaggtcttatagctgttattgctttgtctttaccctcttgtatcttgaggtccatgaagatatcttgtcacctggttttatgtaaatgttcgtgggtttttggttttgttctccagtcacttttttatgtttatgtgtacaattcagaaaaattaaaaaactttgccaccatcttcctagaatcctcacttaacaactttatggaaaaattttaaaatatatattctgtggctattaatcctgtattcttagaatgcttgcttttgccttttgaggctagggcacctctgttcctttagtctcaaatggaatagtttcagtttcaatagcactttgcctctttgaagaacttttataaaattcttatgtttgatttattttcactataatttgccctcgatacctaaatgttattttttttctacttttcttattgaatagcatttatttattgggtatataaccaatattatttgaatagatcatcttcttaaagtgggagtaccagaaccaaaactaatttagctaatatgtattaaacttacacagatagaatgctctattaggtgcgggtgatacagcaatgtaatatttatagatattggccatatttttttatttatgaattcaattaggtagtaaatgatagggaaaaggaaaattatttggatatactctttaagattaaacaagtgtatgagcaaggcactgttaggttctaaagatagaatggtttacaagacacatttcttgtatttcttagtgtgttgtgaggggacagctgagtaaaacaggcaattaccatgtttatttatttattggaaatgcatcataagggtaaatgcaggagcagccagctttttacaggaaggaaaagggaggaaaaaggatatggttcatagtttggagaataaagctagcttcttagaatccccttttgattttttttcaatgcaactgcaaatttttttaaacttggataatttactttattctctccagaataatctcatattttattctttcatttggcccactggagagcagttttgcattttgtttttcttgatacagttccagctgaggttgaaccaagtgactgcatcagaaatttagattaagaaattggaaaggagctgaggaaaaaattacagcataatttttttttttttttttttttttgcttcatatagtaagtttacctcatatacttggggaaagaaaacatctgtgtgtatgtgtgtgtattgagaagttaactgtaaatttacacagtatctaaaatggaactaggctaaagtgaatatttttctttctagatcccatacagtggtccacagaccaagtcctgcattgggtggtttgggtaatgaaggaattcagcatgaccgatatagacctcaccacactcaacatttcggggagagaattatgtagtctcaaccaagaagatttttttcagcgggttcctcggggagaaattctctggagtcatctggaacttctccgaaaatgtatgaaattacagttatttctttacattgtaatttaagcttaattttatttccttgtaactttgttttcatcttagttgtttattgataatgataagtaataagcaataataattaacatttatttactgtataatgctatgctgaaagctctatatgttctttaattcctatagtaacaccataagtcattactttgcttattttttagataggaaagtgaggctttgagagccccataaagtcacagctaggaagtggcagagccaggattcaagcccaggctaacattagaatccaagttcttaaatcagatgctgtgccctacacttagccctcttcatatattccatttgttgccttctgtttgatcagctcttacatttactgctcatctagaaacggaagagatcatttgtttacaggtggcttcctacccattctcttcattattgatgagattaaatcttttttgaagtctttactattaattgaatagagtcttaagagggaaggaagtgtatgcagccaccttttggcattggaagccattggttataagtttttccacttataacttgtaaggcttcagacattattatgattaagtgaccatgtaaagaaattggatgaggcaggcagatcacttgaggttagaagttcgagaccagcctggccaacgtggtgaaaccccatctccactaaaaatacaaaaaataggcggacaaggtggtgcgtgtctgtagtcctacctacttgggaggttgaggcgagaggatagcctgaacctgaaaggcggaggttgcagtgagctgagactgcgccactacactccagcatggtgacagagcaagagtctcaattggaaaaaaaagagagagagaagtttggaaactacttggctgtccaagaaaacaaggcacaaatgtaaattatttttgcttgaattttaatccatcttatatttcagtcactgttaagacaccgaaagcaacccattccttgacagttttgcatatcagaaatgctagccagacccacatatttttcagaacacatgactacaacatactctgactttgcttttgtatcagttatggatgaaaatgttaatgatagcattttgttttattatatacccaataaggagagagctctggtggagggatttttccaccgtaattcaatgcttgcagttttcattcaaggtgctttctctggccaggtgcagtggctcactcctgtaaccccagcactttgggagtctggggtgggcagatcacttgagatgaggagttgaaagtgctttctctgctggtgaataagaaatgagctctggagagaggcatttcttaattgtttataattttattcttgtgaggattctcccagatgttttttttaagtatctatgatactaaaagacttagtacattcattgtatttgcagcatttatttccaatttccattcttactagataagtaagttgaatgtcctggttgaagctttgtccttggtttcacagatttccttccctgcagaggttttgaaatgaataaggtagattctgaattgtgaaacatgtgagtcatgtttattgaaacactttcttataagaaatctcaagaacacaacaaagatagtgcatagatggtagtttcatttttcccaaatccacgttttttccagtctttcccaggtcagctgtttgttgtggctgtctctttctggttctcttattgcttctcaaactttaaagcttattcataggcttttcccagaacagaagtcaaaggtgtcttgtgtatctttccatttccatgcagttgaatgagtcttcctcagaaaagctctgctctggaaccattgctttgtcttttaaagcaacaaagtcccacagcctagatgagtgtctcacggaatttcttggtgatccagccatggttcttcactctgccggggtagggaaatcccatctgctttggaaatctagtgctcagttcagaattgggagatgggcaggatgatgtgtaagggtatttctaacagactttctagaattcacaagtcttacttctcagaatagggttttttgagctcagtgtagttagtactctggtcccttctgtagagagaagtctgcagcctatctgcgaaaggcactgattctgggacagaactgttaataacccagcctctattatccatcctcagtgatctctcaagaagcagcagtactgaagaggtagggctccttcttcagatatttgtatgagattattcacctgagccaccacctgcctgcagtcccccctatgttgaaactacatccaagtcccactatacatgggaggataattaggaaatgtcccagtactaccagttccatgatgtccttctcggtgtgaatctctgtcttctgtcaccaaaggcaaatgaagttctcagtttgctaagggttttatttaggaaaaataattgttttattcctgtagtgtctaatgtttcttcataaaatggctccatatcccccagggctttgcctctcaagactgcttactttgtgtgtagcaaggatttggaggtttcagggaggaatgtgatattcagagtgcctgtactttgaagagattggtcttggaccagtctttcaaaaactttttttttttccccctgtggtctgccttctgtcttgagagtttccaggaaacagaccaaactccaatctgagaattaggacttagaaggtgattttacaagttgattatgcctgtgctgtgtgatggtgatgctttcgtttgcctcttttgaggctaggttcctttagtctcaaatagttcctctttgaggaacttttataaaattctgaggaaaatttactacaaacataaagtgcgtattttttttatcaagagagaccacagttctggaggagaatgctcagaactaggagtctggataaaacagtgaggttgtcagttgactgaaaaagtaactgttttgtgcactgtgctttttaaaaacatgtttctttaatcctcacaataacctcatgaggcagtaagtataggtgtctaatttaaacttgaagaagttaatgttgaaagaggtcggtaattttaccaaagtcatatagtcagtaagagctaagaactaaatccagatctgtctgaagccagtcccatataattcttaagtcctcagtcttcagaccctcaaagctcccatctgataggattctgacctctttttacttccccaaccttttccagctctgcgtgtctggaactggatcctggcaaggcacccttagcggagtcttcttgggagcccaggcctcagtacccagaatgattgctggagggtatagtttcaatttcaagagagaggcatgcaatttgtgatgggcacaaagtaggctgaagtaatagagactgggatgtgcaattcttgtgagaggtaaagaataacatctaagtagggaataacaacagataagtaatgaatggttctgtaaagccttatctcaggacctttatagtatttttattttgggaactatatttttaaatgtgaaattatttagtttaattgagacatttaggactgctacaattgtgttgaaaatttgctgtctttaagtagaagcattataaagcttaagcagctttagtcaaaagtggatgttataacaaataatgggaaggaggcctttttggtggagatacgtacctaaataatttaattttggtgtatattttatctttgatctgatcttgaagatttccatatttttacatggctttatgtggatttcaatacaaatgtttacatttagaaaaccatagttctctgcagaactttactgaacactaaaagacattggagcttttccctgtgttatttctcttaaggtatcttttccttttaaagtgactatcaaatatttttaaggtttttatgccagtaagtttcagttcagtgttttggttttaattgtggagttctttttaaaagaaccatgtttattaagttgagttttattggattggggtttttatatttttggttttaaataaaaacaaaaaatttttgtttttttcagatgtattggcaagtcaagaacaacagatgaatgaaatagttacaattgatcaacgtgagtatttgtacctatatttgcccttttattaataagaaatgtttatttgataccgcaaggtaataaaaaggaaaattatttaaaaaaattttttttctacacacaaaatatcttttgttctgtggaatgaaagctcgacacaagtactttataagatccactcatgtgtttttaaatgatacgattaacataacagcttgctttgtatctcagttcaccaaaatttgttaggacatcatttgtttcatctttactgactgttaattaccaagttgtaagaacaattctaaccacattcatacctgacagaactttcatgcctgataataactggatattaggtagcatccaattgaaatatcagtataggttggatacagcagagaaaatattcaagtgtccaaaacaaacttgaggagttacaatgggtttgaaatgaagaaaaaaggccaagttaaaataggaaaacaaatagttttcatttggtgggagttgcaatcaaagtatacagttgtatacattctaatggatcatctgtcccatgtggcattttccaaggcttgaagagtctaccagggcaaacccttcgccgcctccactacttttgcttggcttttcccctttcttttctctcgctttgccttcagctttattctttacctttgattcatctatattgggtactgtacttgctagaagtacagtctagaagagtctttttgtttctcttaatatccatctccattttcatgtcatcttttccatcttttacctcatgttgcattttctcttggcatgtttgggtttgggtaccaccacagttgctgtctcttaaacatctttcattaaaacattactgtctagtttgagaatacttttaagcctgctgagctcttttggggcatttttccccccttttcagcatgcatctttcttttccgcttatgccataagcttttagctatgttttacctgaggtacgaacacacacgtcacaagatcatcccaaccggctaaaatttttaatgaggaatttgagatacacaaagaaagtataactaacacctgtgtacatcattagaaataaaattttttacaccaagtatacctgttgtaggtttcattttcctctctcctaccagagaactatcttgaattttatgtttattactgtctgcatattttatatttttaccaactatgtaatcgtaaacactgtatagcattgttttccacatgtttaaacattgtttgtaaaataatacattgtacatattattttataacttttttatcatttgagaattactcatgttgatacttgcagctgtttcattcattttcactgctgtatcttttaaatgctgtgaaaacatcattgaatgaatatttgtaagaacatgtgtgagatgttcgtgtcatagggtttctatcctttcagccttactccagatattgccagattctcaaagtggtggtgtgaattctcatttgtccacatttagtacaatatatttgacaaaccgtttttatgaacaaatgttttaagaacaaacatgtttaaatactctttgtctaatgtgtatgcatcactaagttatttccaaacaagaatactagctcttactaagatgcacaaactataatgcaagcgttatactttaccatctgaacttttttgttattttgtttgaaattgtggattgaggctttctgtagtgaagtactttcttgggggtaattcatagggcattagttaaagtgataatgtctttcagtaattttttttttttcctgcttgtattggaagaaaaaaaatttctccttgtctgtctttgcagctgtgcaaattattccagcatcagtgcaatctgctacacctactaccattaaagttataaatagtagtgcgaaagcagccaaagtacaaagagcgccgaggatttcaggagaagatagaagctcacctgggaacagaacaggtatttttgtattttcttgtatttataaaatatatctatctaattaggtatattttgttgtattttactgtatgaaaaatgtgaatttggactatccctctggcagtttttagacagcatttctagaaaaacaaaaattgtttttgccatggctgagatttaaaccacgggaccagtttgttgtctttgccttgggctaatctataacactatagctaatgctttgttcctcttaccaatttaggaaacaatggccaaatccaactatggcagtttttgctagaacttcttactgataaggacgctcgagactgcatttcttgggttggtgatgaaggtgaatttaagctaaatcagcctgaactggttgcacagaaatggggacagcgtaaaaataagcctacgatgaactatgagaaactcagtcgtgcattaaggtaagcctttattacttttttttctgttatcaaaaatagaaactttctaaaaaatagtttcttattctagatgtaataagcattgttatgtaatgatattaaaaacttgtttatgtttttttctttacatattaaaaaacctttttaaaaagatcttaataatttcgaggtacagttttttttttacaaaattactctaagattgtttgtttttatctgatttgaaagctataatactctgtcccaaaaaaaaatgtttaatttttgaggtttttattatttgcatagatgaattgagtgttagtttttaatgagtaagcagaaactgtcctctgtttttacaattacaagcagaatattgacccattttctacacaatctgcctaaatctggatatccaatctttacattgatacaaactctccgtaagtagtataaggttttttgacagaaattactatcagaaattatgcctactacagtgatggaaattcaacaggtacatttaagtatctgagaagaaggatatataagaatatcacggaattatgtctgattttttgggagattgaatatagtaaaatagttctgcaattcacgagtttttctaaatagcatgcttttactgcttcttcatgtttcacttggccattttcacactgaaagattataatttagctcacacacacacactctcccttcccctttccatcccttcatctcagtatcccaatataattatatggaaattttggttcagcgagtattcattgttacagtattacggccatgtaactattattacatagttggctgtgattatttttcttttcctgaatgaccctttttttctcagagttcatgagtaactaaaatgtttagttttcaaaatgcttatcctttaccattcagtctcaaacacattgccaactgtctaaagattcttcgtttataatcataattaaagctgccatttttgagagttgatacagattgtatacatacaagtcccctcaaaattacaggtaaattgttagagttaataattaagatgtcagttcccccccagattgatctaagtttcagtgcagcaacttagtttaatttgaaaaatcaaactaagtttttcatagaacttgagaagataattgtaaaatttacatgggactataaagtaccatggtagtcaggacacctgaagattagcaaagtggaaagacttgtcccacaggatattgagactgactctaaagttacagtaataagacagttatgctattttctcaagacaaataggccatacagtagaatagggagccaaaatagaaccaggaatatgtaagcatttgatttaaagaaatggcagtggggagaaaacatatgaggaaacgacctgcttttcaataatcagtgctgggataatttactctccatctctggggaaaagtaaaagttgacctcttgcttatgccgtaccaaaaatcaattccatgtagcttgtagctctacatgtaaaaagtaaaatagaaaaggatctagaaatactttcataacttctggtggtagggagacatttaaacagaatcaaaaggactaattctaaagggaaagatcaataaactggactatatttaaattaggaatttctgttcgttgaaagccttattaagagagccacacatgtcggacagaagtatctagaatatctaaccaattcttacaaatcaattttttaatgggcaagagacttgaatagacacctcaggctagagattatccaaatggccaatgaatatatgcaaaggtgtacggcctcattagtattcagagtaatgcaattgaaaaccataattaaatggtacaactcaccccctagagtggctacaatttaaaagattgccagaactaagctctgttgaggatatggagcaatgggaatgcttctacccttttgataggaatgtaaattgtaacagttgctcccctaagcaactgtttcatacacatcaaacagagatgtacttctatgcccatacacatgttcatagcagattatttataacatccaaaccccagaaacaaccagatatctatcaacagtagagtgaatgaatcatttatggtatattcatacaagaataccttgcattcttgaaaactaagctcctgctacaaacaatgaccagtgaacctcacaaacataatgttcagtgacagaatccagacccaaaagaccaaattctgtatgattacatttatttagtaaagttcaaaaaacaggaaaattaaatttcagtatttagggatgcatgtttgggtgataaaaatataaagaaaaagcagtcaaattactatcatgatacaggcttgtgtttaccttttagagccaggatttggggagtgattgggaggggacataaaggggattctagatgctggcagtgttctgtttcttgacctgagtgatacttaacaggtgagtgaatgttcactttgtaataaatcactgaactgttcacttctgtgtccttttgtttgtgtgatatatttgcaattaaaaagtttaaaaaaatacaagtttaaaaaaaaagagggaagaaaagaaatcatatccatgaaatacaggtattgtgtatctttcattttagggaggcaacaagtggaataaatgctactatatacagttgtgtgatgcatctactagatcaaaagaagtattcagtaaaattcaaatttatgtgtgtatattcttttttatcacctcttaccaagaaatatgattatgccaactccattttcctcctagaattataaaacctctttccttttccattttcctttttttccccacgtatagtcttacatattaatgtagaaattttttaaagcaattgatatgcctatagcatttttaactggatggcaaggaattgttggtttatgagctgaaatccaaattctgtactaatgtaattgacataaatggaaactacaagactgcccaatgtgttatatctcttactgggaaatcaaacataactatttttcttttgctattctggaattagggaaagatgacaatttcctgtatataggtcagtcctttcattaatagactcttgattaagccaagtgacttttatcctgctaaatgtgatagtttatatctggtacttttgcaaatagttgtttcttttataatagccctttgtcagtgggcagtgcaattttaaaataagggctttgcaatctgccagtcgtggaaagagcttgacttgcctctttttcctgttgttggaattagcaatacatagtgtgtgtttaaataaagtctgttttccaaaggaaacataaatccagctccatttgcatctctatagaatgcagcagtaaactagatttctagaatgattgccggaactctgcttgtgtacgtttagaaacattgtctctttgcaatgtcctttacctgtttttctgtatcctctgtttcttttagaccttttccttagacttaaagctccctattgggcttggataatttatctgaaatttggaaagcgtttacatagtgaaataataaagatgaagacatgacttcatcatataggattctttacaagacagaaaagaagtggaatatatgtattaattttttttatattatcgatttttattaacatagcttatattttgtagagggctgtgtgccagtcattgtatactaagcactttacaaagattatccctttaatcctcaacaatgatatgagggtataagcactgttaacctcactttatagatgaggaataaaagctttgagaaaatatgactcctgtggtctcaaaaatgttaggttttgaatcttggctttctgactccaaagctcttgttcttaggctcttctactgctctcaaggttttttgttttgtttaataattatttttaaatcaatgttttattctaattgttgaaaatatgttttgaaagtttaatgtatagagttttggagtagtgagcattgaaattttagtaaataatgttgggatgtttcatttgatagtagcattaaatattctacatagcttcaatattaattgctattgtggcggatgcagtactctactaggcttctgcttatggaatagtctgtaaattattgtaagaagtctcattttttctgaagtctctaatttttttttctctttttgaagatattattacgatggggacatgatttgtaaagttcaaggcaagagatttgtgtacaagtttgtctgtgacttgaagactcttattggatacagtgcagcggagttgaaccgtttggtcacagaatgtgaacagaagaaacttgcaaagatgcagctccatggaattgcccagccagtcacagcagtagctctggctactgcttctctgcaaacggaaaaggataattgagccccaggacattctgagactccaaagtctttcttaaaatgtttagagcaagtatagctcttacctttattactgaatttgaatcttcttttatttctaggctgtacagtctgatgcatgatttttttataaatatttcatactcttgtgaatttggatctttttactttgagcatatattttagaatatgtgtatgttaaaggatctccacaatgtctgcagtgtgaaggcaggttcattgtggaatagtttaacagtcaggaaggctaaactggtcagtattaatgtgtagccctaccaaaaatagccagtagtatctgaaaatgaaaaataaatgaagtatctctaggaaacagtctggcttaactatttttgaaaatataactgtttcccctctctgctgctttagatgttgctttacatagaaccagaaaatggaatttctcagctaaagcatgtgtgcctgtttcatctaatcaagcagagctaaaatgttcataccgaataaatttatattaataaattactaaactaagagtatcaggttatttatatatttgcaagcaaaggacagtaagaagttgactggcaaaagagcagtgctgaaggaggagatccaggtttaaatctggcttattaactcaagccaattttaaggattttctgtatagattactcatgtcagaccaagaatttaaattattttgagagaggcatttaattctaataaaccagctgttataaaaattataaaatgatctctgtttttcctgtcagagatttaaaaaactgaaaaggtatacctcaacccaaaaataaaggtttgttttggtttgttatggcttccttttttaaaaaattaccctgtagtgccagtttattatgcaaagcagcttatattcctttgtttctgataaaatgaagactttaaatcagtcagtagtactttacctttcaaggcattagtaaattacttgcaaatagttttaaaaggaaaatacgacctttgttataggcagtcttctctttaagacaatacttttccacttgttttccttttccatattatatatgtgtattcatatagctgtatacatattcagttgatcattttataaacatatgaaggcataaagatatacagaagaaaaattattaaacaactcattttaagattcaaattaactaattcctgcatatatgacattccttacataagcgaacactaaacaaaaatggctagaaatgtctttttctttcttttctctctttgttgtttaaggtattaagcacgaattattacatgagactggcagatagctattaatcctcttacagatttgagaaagttgattctcaaatatttatgcaccttctccttcattgttttctttaaatctgtcctcttaaaaagcttcttaagagctcagttaatgcttttgacttaactaggagaaaaaggcatgataatacaggcaagatggcattgttagcaattctggtagtggtttggaatgaatcctaagaggcagggatcttaaggacaaggaagagaagagagagagggagggatctttgatctctttctctggtaatcttaatgcataattttactaaaacatgttctcaattcattcatattattaagctcttcctgcagttgatatctgagcagagtaagatttgtatttccatttttacttttttgaaagagaatatatggacagattattagtacaatttgggcactgtggttttaagaatatctgagtaaaataacaatatgaaataataaacagaagctctaacgtcaggtaacaaatagacagcaagaaaggttttgcaccatcctcttacggcctagagagttgacaagttgcttgtagttttaaaaaaataataaagtatacccttctggtatatcatcaagagcttaagaatcttggctttcatatttaaaatgcttttggggagacatatattaaaattttagccaagatgatagacatgtctcaattatatatgtgtgtgtatgtttttaaagctaaaaacattacttttagatccctagaatgaaaatttttttctcatctatgcaattcccatatggtttttttttaaatcatattttattcattttctccctttagcaattttcattttatttctcataatttgaacagagacagttctcatacatgatcagatgctttttttttcttcttaccatcatttatgcatgacataggtaatgtgactaatttctccagttgattcaagaaactcattactttgcctcaaattatatgtaaaatatttgttttacttaggttacagttatcagaaaggtagtttttttcttctattaaaatataacattgtgaaagaaaataaaatttatgctattctttgctttgtttttataaatgaatttttcatagaatttacagtatattcaaaggaagaaagataaaattattggtcatcatttgtaccttagaagtacaagaatttaagtaaaagaaatgttcatttttgttttaaaatttgttttccatgtgaagtttttattgagccaactttcatacatatcttgctagcctaaagtctaaatatttgtgttggcatcagaaaaacaaatgaggcagaattgctatgtgtggttgatcttcagataaattgactgatcacagttatttttgtatcagtctatgttattaggaaaaattgtttagttgttttctcccctgattaatggtgatattcaagtatgatacaaaaagaattgtaccaccaaatatttttgtgaggtctgctgttttccatattcattttatgctactgcctttaagaaagaactagtgtatccttgaaatagcacaaaaatgttttaaaattcataattgcaaaacaaatctgtgactaacttaatgtcttcagatctaaagggtgtaaaaatattgatacttcaatatttcacttgctgccaggaaaaacaaaattctcaatcttttgtaaatgggaggaggacttttgcatacatttttactctttaaataacgacaacgacacttatactgtcataataacaattatgtatttctttgtggttttaattttttttgtaattttacataaaacagttattttctatttttacgcagataaatatttgtgcataaaatgtaaaaatagtaaaatgagaaaaataaaactattatacagtatgtttctgtgttgcttaaaagttttttttcctgaaaacaaaatcttaaatccccaggatattttgttggatagtaatctgacagtccacttatgatacgttgtacataggattccgatgcatttttaaacttaaaagctgtcaatttgggaagaacatatttcactgaactaaaattagtaggttcatctctttgaggaaattaatgaaattccatctacaaagccaagttgttttagaatagtaacagatgaagctgtcagaaggcaagctgatgattgctaaattgtaaacctttcataaagcctttttttttaacaaacaaaaaatcacctgttcatgttggctatcagcaggttgcttcagccagaatcagaatatagaagaatggaaagggttaggaaaaagtgattcatgcctgccttcatggtgaagcaatgatgaaagtttgattgacatgcttaaataggaagttatggttagaaataaatggctttaaaaatacacagtgtgattgtatctagttcgaagcaatcaaaaaccatcagccaggacgctagtgaggtatgtttgttctcccaggacttcagttttttgtgtgtacagcttcagagtttaatttacaagccaagtatgtgtttaaaatgctttttactgataaactgacaactttagaacactgcttttaaaaatttccgtagtgaaggaccactttcttatttccaatttgtcacagacaaacatctgtaaaataaaaactgaattagtacagggagggggaaatgggaagttactgtttaatgggcatagagtttcagttttgcaagatgaaaaacaagatggttacacaactataaacatgcttaacaataccaaaccgtattaaagatggttaagatggtaaatttcatattatgtatattttaccacagttgagttttttttttaaagaatgaattactataagaattttaaaaattcagtatttaccaaattaacaatacaatgggggaggaacacattcaactcaatagatgcagaaaaatgtacaacttgacatccattcatgattaaaactctcagcaaactagagaacttctttaacctgataaaaaggtatctgtggaaaaacctacaactaacatcacgtttgttgcccctcaccactccgcccccctccccacaagatttgggaaacgcaaagaggtacctgcttttataatttttattcagaattgtatcctagtctgtgaaataaggtaagaaaaataaaaagcatacatactgcaaaaataaaactgcagaaggcatcagacatgttaaaacgcctcaagaatcaaaagttatgagaatatagcaaggtaaggtacaaggtcaatatgcgaagttcaattttatttctgcgtgctagaaactaataaatggaaattaatatttaaaaaccaccatttacaataatattaacgtgaaatagggacaaatagagcaaaatttgtgcaagacctatcaatgaaaactatagaacttgcaaagaaatgaaagaatgtctaagtaggtggagatataacaccataattctggattggaagactcaattttgggttttcttgtttttttttgagacagtctcactcactgtgtcacccaagctggagtacagtagtgcgatctcagcccactacaacctccgcctcctgggttcaagcgattctcatgcttcagcctcccaaatagctgggattacaggcatgtcccatgacacctggctgattttttgtatttttagtagagttgggggcttcgctatgttggccaggctggtctcgaactcctgacctcaagtgatctgcctggctcggcctcctgaagtgctgggattacaggcgtgagcaccgtgcctggcctaagacccaattgtgtaaatgtaaatcttgtaaatgttagttattcctaaattgacctataaattgaattacaacaaaaattctgccagtctttttttgtagacaagctagttataaaatttatatgtaaatacaaatgacacagaatagccaaaatattttggaaaaagagaacttgcactgtgctatataaagctttgctatataaagctacagcaatcaagaggtggtatttaggtaaggataaatgtatataggtcaatgaacagaatagaatccagaaatggacccacatatatggctcattgatttttggtgccaaaatcaaaggtgccaaggtaattcaatagggaaagggtagttatttcaacaaatgttagaacaactgcatatattcatggagaaaaacccttgcctcataccacacataaaaacaatggattatagacctaaatataaaatctaaaacttattaaggaattttcataaccttggggtagataaagatttcctagatattaaagaagcaaaactaggctggatgtggtggctcatacctgtaaatacagtgctttggaaagctgaggcaggaagattacttgaggccatgagttttgagaccagcctgggcaacatagcaagaccctatctctacaaaaatataaaagttaaaataaaattagctgggcatggttgtgtacggctgtagttccagctactcagaaggctgaggagggaggattgcttgagcccaggttaaaattcgaggttcaagtgcaggttgagtttgaggttacagtgaggtatgattctgccgctacaacagcactccagtctgggggtgacagagtgagacgctgtatctaataaaaaaaaaaaaagacagtaaattggacttcatcaaaaatttttaaaacacctgttatttgaaagatactattaaaataaaaggcaaggctgggtgtagtgacacatgcctgtaatttcattgctttgggaggctgactggggaggactgcttgaacccaggagtttgagaccagcctgggcaacatcgtgagaccccctctctatgaaaaaaaaaaatttaattagccaaccttggtagcatggacctgtagttctggctactcagaagcctgaggcaggaacactgtttgagtccaggagtttgaggttataataagctatgatcataccagtgcactctagcctgggtgagagagcaagaccctgtctcaaaaaaaaaaaaaaaaaaaagaaaagaaaattaaataaaggacaaggtacagattggaagaaaatatttgcaatacacttatcttacctaggttacaaaggtaagataagtgtattgaccacactgatttataatattttgtcattaagcaatgagcatcagttgtaactgaatgattatggcaatattaatatcttacaaaggtaagatatttaatatcaaaatatatgataaattcttttaactcactaagataatcaaataatttatggtcaaaggatttgtacagacacttcataaaaaaagatatacatatggccagtaagcatatgaaaagctatttggcattattagttatcacgaaataccaagtcacaatccagtaccactaaaaacacattacaactgctaaaagttaaaagactcacaataccaactgttctcaatgacatggaccaaatgaagtcacacacattgctagtggaaatgtaaaatggcacactactttggaaaagttaaacacttttgtcacgacacagcaattctaatcctaggcatttattttatgtatttatttttttgagacagagcttcactcttgtcacccaggctagagtgcaatggtgcgatctcggctcactgcaacctccacctcccaggttcaagtgattctcctgcctcagcctcccaagtacctgggattacaggcaccagccatcaagtccgggtaatttttgtatttttagtggagacagagttttgccacgttggccgggctagtctcgaactcccgacctcaggtgatctgcccgcctaggcctcccaaagtgctggcattacaggtatgagccaccgtggctggcccaatcctagacatttatttaagagaaataaaatatgttcactgaaagacttgtacacgaatgtttataacagctttattcataatgtctccaaactgttaacacaaatatccatcagcaggtgactgaataaacaaattatgaatacccatagaacagaagtacgactcagcaataaaagggagtgaacaactgcctcatcaacaactctggaaaaggcaaatctcattgtaaggatagaaagcagatcactggttgcctagggctagggataatggttgatttcctggattaggcataaagaaatttgggaggatgatgagcatagcctatattatgctttgttgacgattacatggatgaacagatttgtcaaaactcatctaaatgtatacttaaaataggtgcatggggttatgtaaatttcacctcaataagcttaaaaactgaattactagagaaatgaaatttaaaagacaaaaatacataaccactttttaaaaattattagattccacaagcataagattgctatatcaaattatcaaaattgttttaatgcttgctcttatctccctgtggactgatgacaaacagttcacggactgaccacactgatctacaacatttcatcaactgatgagcatcagttttaactgaacgattatggcaatgttaatggtatttgaaaatttctctgtaaaccttttttttttttttttttgagactgagagtctcactctgttacccaggctggagcgcagtggcttgatcttggctcactgcaacctccacttcctgagtttaagcgattctcctgcctcagcctccccagtacctgagattataggcctgcatcaccacgcccagctaatttttgtagttttagtagagacagggtttcaccatgttggccaggctggtcttgaactcctgagctcaagtgatctgcctgcctgagcctcccaaagtgctgggattacaggcatgagccaccatgcccggctgtaatgtgagaaaagcattttctcatgtctgctaacaagatagttgatttgggaatcttatttccatgatactagtaacacccagttagcacctatgctatttttataggtaacaccacagtaactagacatgaatgaaatagaacactgaagaaaaagttatttatcatatctatgagcaactctttaattcacttccttagaaaactatgcaaaaaggtttgctctaatactcacagtacgaatagagaaagtaagcttcctatctctaatgttggttttactttgtgaatgagagggcatattgcatattaatacactgataaacatcactgaatagttgaactagaatgttcatttgacttaatggttaaaggaaaaagctatgcattaagaactccatactaggattcttgtctccagctctcaaatcataaaaatagaggatttttgtttgtttttgagacagagtcactctgttgcccaggctgcagtgcagtggcacgatctcggctcactgcaaccttcaccttccaggttcaagcaattctcctgcctcagtcttccatgtagctgggattacaggtgtgagctaccacatctggctaatttttgtattttatagagatgaggtttcaccatgttggccaggctggtctcgaactcctgacctcaagtgatctggccaacttggcctcccaaagtgctggcgagaggtaacagcctgctagcagccctcgcagccctcactcgctctcggagcctcctcggccttggcgcccactctcgccgcgcttgaggagcccttcagcccgccgctgcactgtgggagtccctttctgggctggccaaggccggagccggctccctcagcttgcggggaagcgtggagggagaggcgcgggcgggaacccgggctgcccgcggcgcttgcgggccagcgcgagttccgggtgggcgtgggctccgcgggcccgcactcagagcggcctgccgccccaggcagtgaggggcttagcacctgggccagcagctgctgtgctagatttctcgtgcgggccttagctgcctccccgggggcagggctcgggacctgcagcctgccatgcctgagcctcccccctctctctctgtgggctcctgcgcggcccgagcctccctgacgagcgccgccccctgctccacggcgcccaggcccatcgaccgcacgagggctgaggagtgcttgcgcagggcgtgggactggcaggcagctccacctgcagccggtgcgggatccactgggtgaagccagctgggctcctgagtctggtggggacttggctaatctttatgtctagctaagggattgtaaatacaccaatcagcactctgtatctagctcaaggtttgtaaatgcaccaatcagcactctgtgtctagctcaggatttgtaaatataccaatccacactctgtatctagctaatgtagtagggacttggagaacttttgtgtctagctcagggttcctaaacgcaccaatcagcaccctgtcaaaatggaccaatcagctctctgtaaaacagaccaatcagctctctgtaaaatggaccaattagcaggatgtgggtggggccagataagagaataaaagcaggctgcccgaatgagcagtagcaactcgctgtggtccgcttctgtagtgtgaggaggtgtgttctttccgtctttgcaataagtgttgctgttgctcactctgggtccagctgcgtttatgagctgtaacactcaccgctaaggtccgcagattcactcttgaagccagtgagaccacaaacccaccaggaggaacgaacaactccagctgcgccaccttaagagctgtaacactcactgaaggtttgcagcttcactcctgagccagcgtagaccatgaacacaccggaaggaagaaactcggaacacatccgaacatcagaaggaacaaactccggacacgccgcctttaagaactgtaacaccgccagggtccacggcttcatgcttgaagttggtaagaccaagaacccaccaattccggacacgttttggcgaccacgaagggacttttgcctgtcgctgagcggtgagaccatcgcctatcgccaagcagtgagtaccattggaccccttttgcttgctattctgtcctatttttccttagaattcgggggctaaatactgggcacctgtcagccagttaaaagtgaccggcaagtgatctggccaccttggcctcccaaagtgctgggattacaggcgtgagcaaccgcgccgggcgtaaaagtagaggatattttaaatagaattaagtgtgagaatctgccctgttggcataaaatatattagctaattgattaaacaaagaatacctagaataaaggtataaacaaataaccttccattgtggaggatatgtaaagtggcgtgccaaaggaaagaactagaagaaacagattatggtccttttcccactaaccagatacgaaacttacagctagttgtttcacctttgttcacctccattttctctctcctgtgttggggtcgttgacacatttgcctgcagtgcagggccattggaagggttaaatgaactcagtatgtaattcatcttgcaggctcctaaataagtgtaaaggtctaggaaagaaaagcctccctccaaagaatccagtgttctaggttgaaattggtgctcctctcgcgtaatggtgaaaatcacaaagtagcgtaaaaaacatgttgaatgaatgagtaaggaataagagctaattctgatctcttacgatatgtcaagtcgtttatgtgccttctcacttatttctcacaactccttgaagtagataactgtccgttttataaatggagagattgaggcatagagggattagtcaacttggctgaagtcacttgcataagggccaacccaggcttgaagccctgcgtgggcttttcattaggatcaagtctgtctcaacagaatatagctgttaatacctacagtcaatgaaagggaggtgtgtttaacacgtctaaaaaatgagaattgcaaacattgagtatttttttcatttttcctggcttgtacttgtcttacccaaagtgagaagcttataccaaattttactttaagtagtattcatctctaataagtcaacggagttttattaaacattatcatacagccaacccttagtaaaataatggctctaggcaatcatcaccaacagctgctaaaaccactagctgaaaagttagacgctttgtaaaggatggatttgcctcacaatccctgaatacatatatcaatcttagtatcaccaaaagcgagacaaccagggccgggcgcagtggctctgtaattccagcacttgggaggccgaggcgggcggatcacaaggtcaggagatcgagaccatactggctaacacggtgaaaccctgtctctattttaaaaacacaaaaaattacccgggagtggtggcgggcgcctgtagtcccagctactggggaggctgaggcaggagaatggcgtgaacccgggaggcggagcttgcagtgagccaagacagagctactgccctccagcctgggcgacagagtgagactccatctcaaaaaaaaaaaaaaaaaaaaaaaggccaaccagataatcatatgcctcctaatatgacgcattgggacaactcttgccaaaacataaactgaacctaaatctgataaattcctcagatgtaagtaccagttcataggaaatataggacacagagagactgtcatttacatggatagaatcaacaaaaatataaaagaaaataacgttaaaaaaaattacaagaaaaaaagggaaatgtgtagattaaaagagacttaagagtgtcactcaaccaaatgcattctgtggttttgtttgtatcctgattacaataaactataaaagaaattgaggcaatcaaggaaatttgaacgctgtatttttttaaatattaaggaatggctgttctttttttcggtgtgataatagtgttgtggttataaggaggaaaggaaggaaagagaagagagagaaatggaggaaagggattttaatctttcaaaaatgcatactgaagtacttagagatgaaatagtgtgatgtctagcatttgcttcagaatatttcagtgggtggactatagattaaaacacacacacacaaaggccatgtgctgaaagcagactgggtggtagctacatgtagatacatgagggtttattatactgtgctctctgttcagagtatgcgtgaaattttccataaaatagtgcatttttaaaaaactattataaagaagcttacctaaaagaatagcacagatgcggcaatgtcacctacaaaatcatagcaggtttttaaaactgcatcactaggtaaagaatacatatttgttttcatgaaatgggcactttatgtaacaaatgtgtttctgaaaaagttgtacctaaataaaatattataagcataattgttagcagtattatatatactgtttggccccccccaaaaaagatgcatttataattttttttgcgatcctcccacctcagcctttcgctgggaccacaggagtatgctacaactcttggctaattctttctaaatttttggtagatgcaggttctccctgtgttgcccagcctggtctcacactcctgggctcaagggatcctcccaccttggcctcccaaagtgctagtattaaggcatgagccaatgtgcctagcccatagttcttgaataccaaggaagaaaagaggtttataattaagctctaaattacagaggagtggtattcctgaaaaacgtttagtaagtggaaactgcaactgtaatgcatatatgtagaaacccaagacttgcaatcacttcacaagaaacattaggcacaaattaccacaaggtaacacagcttactgacatggaaatgagattccatcaaacctatttctaaaactccttcatagtttcttattgccgtctggaaaaaaagtgcaatttccttagcgtggtgtgaaagcatggagccagtttttatctttacccagcttccagtttccatgctccttcttcctggaagcattatttatcaaccataattagcccaggtcagatttgtgcattagaaatacggtcacttagcgctgtctcctccactggattagcagccatgacgttcaggacctgatattgtctttgtttatcactgcatcttcaaaccttagttgtggccgggcccagtggctcacatctgtaatcccagcactttgggacaccgaggcaggtggattgaggtcaggagtttgagaccagtctggccaacatggtaaaactctgtctctactaaaaatacaaaagttagcgaggtgtggtggcgcatgcctgtaatcccagctactcgggaggctgaggcaggaggatcgcttgaaccttggaggtggaggttgcagtgagccaagattgtgccactgctctccagtctgagagacagagtgagactccatccgcctcctcctcaaaataaaaatccttaggtgttataatggatacagcactgtagttgtgccattagtcctcaaaattcatggtgttagcatcttatatcacttattttatagacaaagaaaaattattatactagagaactgcatttttttcctacagtttcttagatataattccatggaaacttggatctgctaaaacaatcggcagcatcaatacagcattgggaaatgataaaaggaaatctgttaaaactatcagaaatcttattaatcacatatgtttatccatttgatagataaatcatgtccctttgtcgatttaaaaataatttatattaagatatctttctgacaattattgtgacttttttgagaagcatgctttggtactatagagtatctttagcacagtgattcgtatttggataacaagagtcacaaaaggaaaaatcgcctttactttaatgcttaattatttgccataatatatttgatttgtatatgactttgtagaaactactttgtgctcaagtttgttcctctaaatagaactttatatttcttaattggccagcttgtttcattgatctgtcccaagtctcattatgaaatctcaaaatctcactttgattgatttgaaaaagtggagggaatcagaccatttggttttttttcctttgtttttgacaagatttttggtgcacagtttgagaaatggcagaattaccccccagctaaaatattcggaggctcaaaattcatactaacctttcttgtttcctaagctgaaaaaagctgccacgcagggttcttatggcaggttcttgtcaaattctcacactgaagaaaatcaatgacatatttgagagcatcaagcttcagaagaatttagcaaacaggatgtcagaaacctttcagaaataaaatcattcacctgggtggatttagggctgaaattattccatgatatgtttgataaactttcatgccactgaaaacatttctccctcatatttaggcttctaaaggttttctcgactttcttatgttaaaaattaacccatctcatctctgttgagaaataaataatgccccatatctttgaaaagataaatcaatgttaagattatgttctatgtcctcacttcatctgtgaggatgtcagaatttcttttggctgtttgtcaagtcattggcaatatcagaattatctctcagaagagaaatagttgaacttgtgtcaccctgtgggatctattgggagtgaattagattgtggaaacggcatatgctctatctgaaagtcaatctcagttcactaactagtgtcctagaaatctgaaggaggtaaggatgagaaacaatgtttcctcaaatctctctatattttcactatttcctaaaagttgataactagaagatcaatttagtatctctttggggaggagcatgagtagggactgtggtgtgtgtgggtttgtttgttttttttttttttttggagatggagtttcactcttgttgctcaggctggagtacaatggccagacctcagctcaccacaacctctgcctcccaggttcaagtgattctcatgcctcagcctcccaagtagctgggattacaggcacacaccaccacattggctaatttttatatatttttttttttagtagagatggggtttctccatgttggtcaggctggtcttcaactcctgacctcaggtgatctgcccacctcagcctcccaaagtgctgggattacaggcatgagccaccgcacccgccctgttttttcatttctgttccctctgattgaaatgcttcctctttttatccttccttttccttctttctctctgtcaaaattcccattatcctttattgtccagaattgaccagactgtccttgaacacacttcctttgaagctacactcacctgattttccacctcactgacccctacttttgggttccatactagactcctttttctcttccaaccgcacattaggtgactgtaacgttacaaatcatctatgtgagtcatcaatcttcatatccagctttgatctctcccagaatccattaatatctctatctgcttacaaggatgtatagtaagacattttaatcaaaaaatggcaaaaagaaaactcttttattttttttagaccgagtcttcctctgtcacccaggctggagtgcagtggtgccatctcggctcattgcaacctccacatcctaggttcaagccgttctcatgcctcaacctcctgagtagctgggactataggcacagcaccaccacgatcactaatttttgtatttttagtagagggggtttcaccatgttcaccacgctgatctccaactcttgatctcaggtaatctaccacctcagcttcccaaagggttgggattacaggcatgagccaccgcaccctgccctatcagtaaatattatattataaacacctatcacaaatgcataggtactcagatggatttctggagatgattctttaaatgtgtttaattatgttgattgatttttgaatcacaaactgattttgttttcctgtaatgaacccggcttggctctgatgtattattttggcatgttgctggattcggtgtacaagtattttgttgaaggttggttttttgtctgcaaacataagagatactggtctgtaattttcttttcttgttgtcaggctttcctgtgggtttttgctgtccccataactaagttggaagtgtttcttttgtctcttatttctgaacatttttggataatattgttattttttctttaaatattggatagacttcaccagtgaaaccatctagccctggagttttctttgtgaggagacttttttattagtggattacacttcttaagtagatataggaaaattaagagtttcaatttcatcttaagtcagcttggacaagttgactctttttccaagaaatttgtccacttcatccaacttgtcatatttgttggcataaaattgctattatccattgtctatagaatctgtggtatatcttgctttcattcttgacatcgaaatttgggtttgtctcttttaaaaaaaaaaaaaggtcttgctagggatgaatcaatttcattgatctttttaaggaattaatttttggctttgttaattttctgttatttgttgtcttctctacagatttatgcttttatctttattgctttctttcttgtttgggtttaatgtaatcatatctttctggcttaacgtgaaaacttatgtcactggtttaacacatttacttattttttgagaatccacagaccatttattaagataaatcttatttgagtccatagacaagtcttgataaatttaaaaggattaaaaccacacaaagtatgttctctgactataagggatttaattagaaatcaatagcagaaagatacgtagagaatacccaatgatttggaaattaaacaatacattaaaaagaatttttttactatatacatttaaagctgtgcatttctcctaaacatagcttcagctccatcaaatacattttagaatgtcgtacttttattataattcagtttaaatatatactaagttcctttgtcatttcctattttgcacacttggattatttcaaaatatattatttaatttcaatatctatcacagtggcttttgtcattgtgagaagttacgaagattccaaatttcttatgagtgggtattgtttgctcataaaagtttagcccattaaaaatgatgtggcatatgaaataacataacattttatttccttttttattacttctttgtaaaatccaattttaaacattttattaaaagcaaaaagttatgatatagtattaaaatatttcattttgggctgggtgcagtggctcttgtttgtaatcccagcactttgggacaccgaggcaggtggattgaggtcaggagtttgagaccagcctggccaacatagtgaaaccccatctctactaaaaatacaaaaaattagctgggcatggtggcaggcgcctgtaatcccagctacttgggaggctgaggcaggagaatcgtttgaacctgggaggcggaggatgcaatgagccgagatcacaccattacactccagcctgggcaacaagagagagaagctgtctaaaaataaatttcggtttgaagaatacatacatcagtatctatatatgtaaatcacatgtatttatgtatatgtgatctttacaccacaggtaacttaaaaaatgtgaatgctgttccctaacagacctttttactctcttcagaaacttcataacatggatatttgaaggaaatcctagagctgaatttaaagacggggtttgaggagacttgagtcattctgtatagtaaaataagattttgttgttttgtcattgtttacccataaaatgagggaggagagctaagcactatgcctatgaagcctgcattgcagaatctttcagcaagattaatgtcaaatgtggaattttaagatgttgacattactatatgtcaaagagtgttataacaaagtatcattaaccagtggcttataaacaacagacatttatttctcacagttctggaggcttgaaagtctgatatcaaggtgctggcagatttggtgtctggtgaggacccacttccgggttcatagatgacgccttctcaccactgggtcttcatatggttaaaggggcaagacagctctctgggaccaattttatttatttatttattttgagatggagttttgctcttgttgcccaggctggagtgcaatggcacgatctctgctcaccacaacctccgcctcccaggttgaagcgattctcctgcctcagcctcccaagtagctgggattacaggcatgtgccaccaccccggctgattttgtattttttgtagagacggggtttctccatgttggtcaggctagtcttgaactcccgaccttaggtgatccacccaccttggcctcccaaagtgctgggattacaggcgtgagccaccgcgcccggctgtctgggaccaattttgtaagagcattaaacctattcatgaaagctctgccttcatgacctaatcagctcccaaaggccccacctcctaacaccatcaccttggtgactaggtttcaacatgtgagttttagggagacgcaaacgctcagagtatagtagttatatccttccatgtccactatcgccacctgcacatgtgcctctcataaaaatgcattgaaaaggtgagtttggaggcaattaaccaaaaatctacccagttttagatttaggaaatgtaaatcttaaggaatggaaagccttcctgcagacgtctaagttgtgtttgggtgtgtatttatttgagtatatctgcatataagtgttaaagaatcggaggacaattcactaatacacattcgttatctctagaaaaaggatttttaacacatttgcttattccaatttctactataaaaatagatcactgtagtcatactcccacttatggttaagatggtataaccagaatgaggtaagtctcatttatttatcagcttaaactgagattccagggttgcagcatgcagagagagtagaaaccactgggaagccaagacagctagagttcacagagcagagagaaaaaaatcgcacagagatcaagcttgggagatctgcaaagggttcccctggggctgtccagtgagacctggtcagtagatatacacgggaggatcctacccaaggctggggaaggagccacgtgacaggagcacagggaacaatcctcagagcatacacaggagaagtaatggttgtgcttccaccagccagagaggaaaaccttataaggcatagagtactcggaatgctagagactaaaggctgccctgatcctacctgacaaagtttaaaaagaaagcctagtcccagcggggcgtggtggctcatgcctgtaatcccagcactttgggaggccaaggcaggtggatcacctgaggtcagaagttcgagaccagcctggctaacaaggtgtgaaaccccgtctctactaaaaataaaaaattaaccaggtgtggtggcatacacctgtagtcccagctactggggaggctgaggcaggtgcttgaacccaggaggcagaggttgcagtgagcaaagatcgcaccactgcactccagcctgggtgacagagcaagactcagtccccccccccccaaaaaaaaaaaaaaaacaaaccagcaaagcctagtcccagaataaaatttaaaatgacttttgggaataaaaagtaatagattattgttaatttccattactttaaaatctgatccattacatattatatgcgtgtatcaaaatatcacatatacccccaaaatatatacaactattatatgtcaattttttaaaagttgtacccagtcttcaaattccaactaaaatgctaactgattccttcatctgaatttttgtagcattcttttatggcaattaacacagtctatattttagagattttatccaattgtattgtaaatgggttttatctattaggttggtgcaaaaataatagcgatttttgcaattacttttaatggcaaaaaccacaattactttcgcactaacctaatggttgtgctgtaaattcccaggggatagggaacacccaagattcatacaactttgtgtaaatatgttaaccatcttgcattattagtgccttacataaatctgattttaaaatatatatttgcccagtaaatgaatatttcagtaaagtttaataaaaaaatataagtattaactggctattaattcatatgaatttatgtagaagtcttcttaaaaatttgagagttaacttaagaatcattctcatatcattattgccagcatgttttccaaagtatgagcctaaatatatggactagccagttctcatggccattagtgtacacttgtaaaattatttttatttatgttggaatttgcaaagtctattttcaaatccaactgggattatttttatggcagagattattacagcggtatttctaagtcatgtagaaaaaaatgtgaatctgggaggttctgtgatgcttagagatttcagttccaacttgttccagttgatgtcactatggcaaaggtatcccacacatgtggcatacagcagcgggggaaggaggatacaaatctaataatgtggccaaatcaagaggaaacgtatttgggggcaaggctaaaatgggaatgggagcatggcagaacatcaggattccacatctggaatcagaggggctgagtgaatgcatttacctgatcttctatgagtcagcaaaacaaacacacaaagccatcgtgagtttggaagctgtgaaactgctgctctttgcaatgacagatcttcctatgctctgaactgcagcaatacattgaggtagcagtaattacagactttcatatggcttctctgctctgtagaagtagtaaatgaacctcttggggctaaatttctagctttgggctcctgcaccatctttctccctacaggaagtcacgacagacaacagaggaagtccaaagcaaggacaacgctgtttatgaaaaggagtggtaatggttcagagtgaaaattaacagatgttgggataaaaatgtctgcctgggtactttatggctccaaagtaaataatatgtccctgagttttagcagctgtttagggactcctgtatcttagtgttagtttaaacggcaaggtaaaggaactcatgtaacttaacactgttcatcaacacaaacttactggatatctttctgaaatgtgaaaacagatctgttttcagatactattcaactgtgcaaggaggcaaacagatgtattcattaacactccccacagagcatattgtgatatttgcaaatggaaaatgctggagctgaggttacacaaatgttttctgttatgaaacttccttccataagaccatgattttcaaggaggatctcatttaggactgttttttgttgttatactttctgtaatgggtgatttttctaattaagataatttgcattttaaccttgttttagaaagtgattattctttttttttctgtctaaaggtagataatgttacctgtttaaattcatttttttaacccaagttttgcctcaggatctataagtcaattttttatagtaagatattggatgcccagtgaagaaaaggtttttgccaagctgaaagaaattcaaggcaagattgtgagatgtcattggtacaatacacaccaactaagaatccttgtttctgttttatgcctatgaaccaataacagtgatcagtgtggggacatttcattggaattctgcctgagaaaaagcaggagtgttcagtccttcagcgccaccaacagctctggatgccaaaggaccatgctggtagggctcagagtgctcagacagaagtatgaggcagagtttcatggggaaatgagatgggtctgagatgggtaggaagagggggaaaatgggcctctcaatgctctcatagcctcttaatgctctcaaaacagccactgaggcaatgaaatttttttttaacttttaggttcagagatacatgtgcaagcttgttatacaggtaaattatgtttcaagggggtttgatgtacagattattttgtcacctaggtaataagcatagtatctgataggtcgttttttgatcctcaccctccacccaccctccaccctcaactaagccctggtgtatgtggttcccttctttgtgtccatgtgttctcaatgcttagcttccacttataagtgagaacatgcagtatttggttttctgttcctgcctttgttcacttaggataatggtctccagctctgtccatgtttctgcaaagaacatgatctcattcttcttttatggctgcatagtattccatgctatattgtaccacattttctttatccagtctaccattgatgagcattcagattgattcctcatctttggtactgtgaatagtgctgcaatgaacatgcacatgcatgtcgtctttctggtggaataatttgtattcctttaattatatacccaataatgggattgctaaggtcgaatggtaattctaagttctctaagaaatcaccaaactgctttctgcagtggctgaactaatttacatgagcaccagcaatgtatgtatatgagcattcccttatctttgcaacctcaccagcatctgttatttttttacttttttataatagccattctgactggtgagagatggtatcccactgtggttttgatttgcattaattaaaagagatttatttatttatttatttgagacagggtctggctctgttgcccatgctggagtacagtagtgtgaacaggctcactgcagcctcaacctcccagactcaggtgatcctcctgcctcagcctcctgagtagctggggctacgggtgtgcaccaccacgtctggctaatttttaaattacttgtaaagatggggtcttcctatgatgcccaggctggtcttgaactcctgggctcacgtgatcctcccactttggcctcccaacatgctgggattacagacgtgagccaccacagccagcctgaaacgagttgaaaggcacagggagaacccaggtttctgtggactccaccaggacatgatggaaaatggaccttgaatgaaattccttgattacgtggctaggaagactcctggtatctgctgtggtaacttcaagccacagaggagagacagaaaattccctgagtccgggggataatagtcatgacaagggtgaaacagaaaacgaaaaaaaaagagaggaagggttgatacctgttgacagaataaacactacaaaggaaaatcatccttgtaaagtaaattctgtcaacatgaatcttgttcgtcaaatttgattttaatattgagagtaagatagttttcagtttgtctgctgggaccatgatgaagcactttcttcatctagaatttccctggtgatctttctggggatatttttctgtatcccaagctttcagcaaattttgatgtgttgcccactttgtgtgaagagagatacaaaagaagcttatgtgacccctgcttccccatgtgcaagacaaaactggcccctaatgaattgagatgagattcccaagatttggggacttcatggaagggtaaaattacaaaacaataacaatgttctagttttctaaggctgccataacaaagtcctatggactaggtggctttaacaacaggaatttatttcctcacaattctggaagttagcaatccaaaatcacggttggtttcttaggtcttgagggaaggacctgttacacacttctctctccttgacttttgacggatttcttttccatgtgtcttcacatcatcatctttctttttctttccctccctcccttcccctctctctccttccttcctttcctttgtttttttttttttttttgagagagtctcactttgtcacccaggctggagtgcaatggcactatcttggttcactgcaacctctgcctcctaggttcaagcgattctcccacctcagctcctgagtagctgtgattacaggcacataccaccacgcctggctaatttttgtatgttttggtagagatggggtttcaccatgttggccaggcttgtctcgaactcctgaacttaggtgatccgcctgcctcggcctcccaaagtgctggggttatatgcatgagccgccacacttggccatgtcatcttccttctgttgcttgtctgtatcggaagttcctcccgttattaaggataccagtcaaaaggtgggttattaggcccaccctaataacctcattttaattaatttacctttttaaagactctatcttcaaatacagtcacattctaagtttctggggtttggacctcaatatatgaatcaggggcttggggacagggggaacataattcagcccatagtaagctacaacaacaaacccacaagccaacaacctgaggtggatgacacatgctttcaaaatttgtattttgtaaaatcagaattaaaaaacatggctgggtgcagtggctcatgcctgtaatcccgacactgtggaaggctaaggcaggaaaactgcttgagattaggagttcaagaccagcctgggcaacacagtgagacaccccatctctacaaaaaatttaaaaattacccaggcatggtcatgtatgccttgtagtcccagccattcaggaggctgaggtgggaggaccatttgagcccaggaggtagaggctgcagtgagccatgatggtcactgcactccaggctgggtgacacagcaagaccctttctcaaaaccaaacaagcaacgaacaacaaaacaaaacctatgacattataatttaataaattaacagaaaaaggatgtactagtgatgtaatcaaagaataaaggagtattctttaaatacatttaactttttaagcatctcatatatttatccttattttttaggaccagtgaaattttgaaattttcattagtaactggtgaggatgtgctgaaatacattacggtaattgtaacatggcgccctaggtaaaatttggttctaatattttcaaaaccttaaatatgctggtagaaacctcgcaggaggtgaggcctaaatatatcctgagaccttgcttctgggaaaaccaccagaagggattatttgattatatccatattaagctgatagtttaaccaaaagagtaatttctaaggaggtagaatgttctgtgacatcatgagagaatgagagagcaagagtgacatagaggagttgaggaggtagagcagcccttttttttttttttttttttttttttttttttgagatggagtcttgctctgtcgccaagctggtgcaatctcggctcactgcaacctccaactcccttgttcaggcgattctcctgcctcagcctcccgagtagctgggattacaggcacgcaccaccaagcccagctaatttttgtatttttagtagagacggggtttcaccatgttggccaggatgatctcagtctcctgaccttgtgatccgcctgcctctgcctcccaaagtgctgggataacaggcgtaagcatcgcgcggggccgggtggcatttttataaagagtttatttccctttttaaatttaagctacactatgcctatgatctgctactctttcttatggaggtaggggtgtgtgcgtgtgggtgtgagagagtgtgtcttgttcttgttgttgcttctgttgttgttaaagaaattattcatgagtgatgcagggttgagacttagccattgatagaaaatacgtgagggcagatcttcatctcacacaaagagggaactcaagtgataaagtagaattgagcctggactataattttgatctcttgcatgtgaagctattaaaacagaatcatacatatttggagaaaggttctgatattatactaatgtattctggtgtgatttcttaccgatgccctatgacaaattccaagccctataggcaaagtttttgttgatgcaaaaggatattctcatcagttatttcagaaagaggtgcattctaaatgaggaaattaggactgacaactcagtccttagattggcttggcaaggagaaactgtatggcacctgtttctgttgtatagatctttgctggtagcacgggataccagtgtcaggagactagctcaaaggtactctgtctgggtagaggattacatactttctatcctcatgcacactgggccaaggcatccggtaaagatggctcctggacgaagagctctgaaagctgcagtatccattggcagctgaaataaaactgtgtattgcattgaaatgactttctgtcattcgagttaagtcctgaacgttgagttaagtcttactaaaggctgcaacctgtctcagttgtgctgagcaataaaagagtaggttccatgtttggtccatgtgggagggacttccgctctttagataatatattggtcctgatgttattaaattcttattttattcattataaatgttttacatgaactaaaagtattgcattaaaatatttattgcaatcactgagtttttctgtgcctctgcaaattttacaccccattatcagcactgattatttcaactataaaacgtcatgatctgttttacagtgagacaaggagttttaagtttccaagttcacaggaaatgaaacaagaaatgtaacaatatggttttatatcacattttgggaggctgaggcgggaggatcacttgaggccaggagtttgagagtagcctgggcaacatagtgagtctcctgtctctttaaaaaaataataaaacagtaaaaatttttaaaaatacaacttatcaaaatttgtgggatgcagtgaaagcagtgcttagaaggaaatttatagcattaaatatatatattagatgaaaagaaatatctaaaatcaataagctataggaaaggaaactatagaaaagaataagagtgatgcaaacagagaaaaaaataaaaattagagcagaaatcactgaaattgaaaataaaccaaagaaaatgaacgaaatcaaagctggacttcagttaataacattgtcactactggttcaataattgtgacaaatgtaccatactaatggaagatgttaataattgaagaagctggctgtgagacatgtctctgaactgtttgtattatctctgcaaatctttaaatacatagctgttacaaaaacaatgttttttaaaaaatattaaatatctggtttgagagggtgaattcattactaagcaagttggcagtatctgcttttaaaaaagctttgagaatgacactaaggacccatattttagagatggctcagatccgacatggccaagactcaggaaaggcatattttgggttccttttgaagtgtgaaatttgagtatgaaattgtctgagatcttcaagcagtcaccttccatccatttccaaatgggacaggatataaataagtttattgcttttgaaagatcatgtgtaaaagggctacaaaaacaaggacatggagaaaaggcagaaggtgcttctagaaataggattttaaaaagtgaaagttctgcgttaacaagacttgcaaaaaaactgcttaggttggcaagagctattttttgaaaaaggaattttgaaggaaagatcagaggtacttgtcccacataaggtctgctttagaaaagatgggatattaatattgctatgtcacctaattttgacttttagaacaggaacaccccaaataacaagggtggtgtaacaaaatagaaagcttgtctcattctcatattgaatttggagccaactgaccagggcttggtttcctcatctgtaagatggatgacaacagcacatcatggtgatggtcatcatcatcataactattagactgtggccgggcgcagtggcttacgcctgtgatcccatcactttgggaggccgaggagggcggatcacctgagtaggagtttgagaccagtctggctaacatggtgaaaccccgtctctactaaagatacaaaagttagccgggcatggtggcaggcgcctgtaatcccagctactcaggaggctgaggcaggggaatcgcttgaacttaggaggcagagtttgcggtgagccaagatagcagcacttcccaggctgggtgacagagcaagactctgtctcaaaaaaaaaaaaataaataaataaataaaaaataagaatcacaaacacatgtatgcacaacccaaacactgacagagaaagctctgtaaatgaacatcctaagcctcattcacacaggacagctttatagatttcttaacatccctgtttttagctatagaattgctaattgtgcaacaaatgctatagaggtgctcgcttggcataaaaaggaacagtgaaatccataagcctgaaatccatcagcatactgaaaaccaaaatgtgggaatactttgggaaggaagtatgtgtgtggtatgggagagagcactggctttgcagccaggtagatttagattggaccctgtcagagccactcactcatagcttaaacttggagactttgcaaacttcgttttctttttagttttttttggagacagggtctcactctgtcaccccaggctgaaatgcagtgacatgatcatgggttgctgcagactcaacctcccgggctaacatgatcctcccaccttagactcctgggtagcggggactatagttgggtgccaccacgctccgctaagttttgtattttttgtgtggagacagggtttcaccatgtttgccaggctggtcttaaactccactcctgggctcaagtgatccacctgccttgatctcccaaagtgctaggattacgggcacgggccacggcacctggcctgcaaatttctttcgtcctgcatttccccacctgtaaggtgaagatgttccctggagatctgtattgttaacgctcttaaaccagtgacacacccagaaactaggacagggatgctattagaataagaaaatatgagaaatatgaggataggaaaatgtttcaaagcaagttgcatgtaatgtaaactagatctctgaagacagggctgttatcttcctgcctaaaataagtggttctgtattatggaacttagctttagctggtggatactagccatgacattttgactcaatgaacaataaactcttccactgtctcacttctcaagaccccccagatgtaacctgctaaaacacctacagattattaatttttattcatatgctctctgacttggtagcaggggagaggcacttaacgttctttagacagaagatgaagaaacagacagtatgtcaacaaattgttagtgttaggagccctttaataacttcagcgaggcatccttttaggagctctaaaaataagcttcaaatttaaagtggcacctagagagctgagattacaggcgtgagccaccatgcctggccctatatttaaattcacgtgtatgcacaccatacccagaaaaccccctttgaaaaaaataacaaagttatttctaattggcaacatacagagttgtacagcttattgtttacaaaataaatcaaactcttaaactgaacgacaggaaagtgagagtttaagatgagagcggttttctgcaaattgggaccaatacctattttagtcaccattccaggtctcctgttatctgaatagtgtcttgtctgatagactaaacttacacaccattactattgttgataatgctaataaactagaaatcaatataatgaactttagcctgaaattccttaaatataagtctttgcattatgcccaaggtatttttattgtattgtcttaaaatttagattttaacatttcgttaagtttaacgtaagaaatgtattctttaagaaaaaacttccactttggatgttttttttggaagaaaaatgccagggacatcatcatacctagagagatttaaaaacagaatgaagctaaaaccaaaaatttggttttatacatttttttgagatggaggttttgcttattgcccaggctggagtgtaatggcatgatttcggctcactgcaacctctgcctcccgggttcaagtgattcttgcctcagcctcctgagtagctgggattacaggtgtgcgtcaccacacttggctaatttttttatttttagtagagacaggagtttcaccatgttggccaggctggcctcaaactcctgacctcaagtgattcgcctgccttggcctcccaaagttctgggattacaggtgtgagccaccgtgcctagcccaaaaatacgtttttattacagaaaaaaagttggtttctttggtacagatttttttcccccataacaacttgctataaaaaagtaagactcacctctcttcttccagcaacccccagggaataagattatccatccagtagagaatagaactaggaaagataaatccctctttgacttctgatattctatttttctgatgttttctgtacctccattactggtttgacataatatttggcctttgagtttttaacttttcccagttgtcattcttgagaaagtgaaaagataataagtttcaacataaatttggagtaagctccagttttcacacaaacacaaatcacaaggcacttacaatgtttcacgagctacaagtcttttaaaaataccacctattagccattgaacacagggctgttacaaacttatttatcagaggacatagttgctatgctctccatataacaacagtttcaaaaacttgcagccattaaaactacatttttttggccgggcgcggtggctcatgcctgtaatcccagcactttgggaggccaaggcaggtggatcacctgagatcaagagttcgagaccagcctggccaacatggcgaaaccccatctctactaaaagtacaaaattagcccggcgtggtggcacgtgcctgtagtcccagctattcaggaggctgaggcatgagaatcgcttgaacccaggaggcagaggttgcagtgagctgagatcacacctctgcactccagcctgggtgaccaagtgagacttcgtctcaaaaaaacaaacaaacaaaaacctttttttcctctcaaatcttttgatcctgaattaatacagaatcttattcaagtggatgctaactccattgtgtggaactttttttcttttctttttttttttttggacagagtcctgctctgtcgcccaggctggaatacaatggtggaatctctgcctactgcaacctctgcctcccgggttcaagcaattctcctgcctcagcctcccgagtagctggcattacaggcccccgccaccacgtccagctaattttggcatttttagtagggacggggttttgccatgttggccaggctggtctcgaactcctgacctcaagcgatccccctgcttcggcatcccaaagtgctgcgattacaggcgtgagctaccgagcccagcctctttgggacatttcttcttttctaaacatacagcagtggtggtgaaaatataaaatgaagatataaaaaggcatagtgatgctcaaaacccaaattagggtctgtgtagactgggaagcagcacttggacagagacagatgagtgagctgaagatccaggactgtggttgtgggtcggagttgggctctgtcgggataaatcgctccgcagaagacgggctagagtctgctcaccattgaaggaaaggccagtgcggtttttctgcccctgaaatgttattcagaactcctgctgctgacactttaccactcaggtttctgcgacagttgggtttctgtggacctgaagaagagggaggacacagactcacaagccggaacggcatgcgacgagccccccagaggcccataactgaactgcagtgtctccagccgcgccctgtgcaatgatttggttctgcattgcgccccctagaggtgagtggaagcaatgtccaagctgtgggcaagtaggattgagtacccgaagggagtgaaagcaaaaagcaaaacgcaaaaacagccaaggagcctgcaaaccaaatattgagaatgcatgaagaaatgcaatgccaagaaagaaaactgcaagatcatcatcaagtaaatgtgggtcagataaaaataataggacaatctgaaagaagactttcacataaatatttaaggtacttcaagggaaaattaagagaaatattctaaaaaaaaaaaagtaaaaggtagagaaaaaaatgtaagacaaaataggcataaataaaccaactatgggtaaacatgaaaaataactgattagaaatatgaaaaataaaaatcataaatataccttaagaaattggataaagtatattggacataattgaaggagaaaattagttgatgaaaccattcatgcagaaatagtggatagatggaaggctttccccatgtattcaaaagaaggtccagaaaagaaaatggagggaagagtagagaaattatatttaaacagtgactagctaaggctttctcagaatcaagttcaaacacaagtttttaaattaggagagggctgggtacagtggctctcacctgtaatcctagcactttaggaggctgaggcaggaggattgcttgagcccaggagttcgaggctgcagtgagccataatcacattactgcaacactacactccagcatgggcaacagagtgagatttttgtcgcaaaaaaaaaaagtaaaagttaaaacataaaataaatttactagaagggtagttcaagtaccaagaataatgaaaaataaaccaaaataagacacattatagtaaaactaggaaaatttaagttactgggaaaaaagattaccacatattaataactgaagttattatcagcaaagatagatgcatagagtgaaatagtatcttaaataaccttaaaggccataattattagcctagtgttttatacccagagaatgagggctatactaagagttggccacagatgtcttcttaattaaaaacaatactggttgggcatggtggctaatgcctgtaatcccagtactttgggaggccaaggcaggcagatcacaagatccaggggttcgagaccagcctgaccaacatggtgaaactctgtctctactaaaaatacaaaaattagacgggcgtggtggcacatgcctgtaatcccagctactcaggaggccaaggcaggagaatcgcttgaacctgggaggcggaggtcgcagtgagccaagatggcaccactgcactccagcctgggtgacagagcgagactccatttcaaaaagaaaaataaaaaataaaataaaaacaatactaacaacaaaaaactattaaaggatatacttcagcaggaaaaaatctgaacccaaagaaaaggcattgagatacaaaaatactgtaaatatggaaactgataaaatattttggtgagaataatatggactatgtaaataaaattatacctctaagcaagaagaaaatgaaagagcagaaaagcaataatgaagcaaataaaaagtatggtgatcaggaagatcaggaaaagaaaaagcaaagaatgagaataagaaaatagaaacaattccagctgtgtaaataatcactaacggtagacagattaaactcaccttttaaagagactgaaatgatcagaatggataataaagcaaaatctagctgcatgttgcctacaagaggcataggttagaattttaaaaataaagggatgtatagttatgcaaaatgggaacagtgagtgagaaaagggtgctaaatacctccttgcacattttttgctgtggcaagtttctgtgaatatatagttatttcaaaatagttatcaaaaaggggagtggataaaaagctatagcattcaagtatcaaccgagataaaggggcatagcaatattaataccatacaaaatcgaatataagacaaaaagaatttaatagggataaaaagatcagtccataataattgaaagaacaatccactgagaaaatataataattgagaacctgaatatacctataataaaacccagaactgtatgaaacaagttcttatggaattaccaggagagagaaaaccacatagtagtaagattccagtatatcactatcagaatctgataaattggaccaaaattagtaaggatgagatttacaaaatacattggctttatctgatagatacctagaattctctctctggcaagcagacatacatttttagagagtatttacaaaaagtgtacagggcatttcaaaaattaaccacacactatatcactaaagaagtttcagcaaatgtcagggattgaatatgacatagacaatgtgctcgcctcatcattcaattaaatggtaaatcaacaaatctgctttttattttttattatttttagaaatagggtatatcactttgtcacctaggctggagtgcagtggtgcaatcatagctcactgcagctatgattgaacctgggcttaagccatcctcctgcctcagcctctctagtagccaggactacaggtacgtgccaccatgcctgactaatttaaaaaatattttgtagaaatggaggtctcgctatgttgcccatgctggtcttgaactcctgggctcgagcagtcttctggtcctggcctcccaaagtgctgggattacctgtgtgagctatcatgcccggcaaagtcagtttttaaaactattcatatggctgcaaacctaagaacttacttcaaaagaattcccacaaaagaattaacaaaattcttagaactgaatgataattaaagtaagtatatcaaaatatatgggattcaaatattcacattaatttctaactttaaatgcactcgtttaaaaaagaaacaagaaagaaatgagtgaagaaggtgtctcaagagctagataaggctgggtgtggtggctcatgctgtaattcctgtactttgggaagccaaggtgggaggatggcttgtccgcaggagtttgaaatcagcctggtcaacataatgggacccccccaccatctctagccccccccccccgaattgtttttaattagctaggtatgctggcctgcacctgtagttccaactactactgaggttgaggtgggaggatcacttgagctcagctgtgaggttgaggctgcaatgagttgtgatagcatcaccatactccaacctgggtgacagagcaagactctgtctcttaacaaacagctagataaatgtaaggaaactataagaacagaaataaagacagaaatacaaatgaatgagataaaataggaaggaatagaaagggtcaaaaacgattaggattaagtaaaagagaacaaaaatatatgaaatttagaaatcatgagtactttgagcaattttataccaataaacctgaaaaattgtgcaactgtaattatctaggaagaaaagtattaacaaactcaagaaaaatagaaaaaaattgatacccattttaattacactgatattatcaaagcctcccttgataggtgtttcatggactcaaatatgtgtctcaaatctaatggcagatgctgaaaattgcaggcaggttatttaagacagtcattttactcatgaataattctgtgtagttctctttcctctggagagaagtagaggtttttcatttaacaatgattaatttttttctagtttatcctggggagtctggcttgttataaacaatactggaggaataattttttggtaaataccgtttgtctgccaaattgatgatctctttagagagtgtttttgttgtctggttggtgtttttttttgttttgttttgttttgtttttttttttaagagatagggtgtcactctgtcacccaggctggagtgcagtggtacaatcatggcacattgcaaccttgaacttctgggtttaagcaatcctcccacctcagcctcctgtgtcactaggactatagatgcatgccaccacacccggctaaaattaaatttaaatttaaatttaaatttttaattatttttttttttggtggagatgagggtctcactatgttgcccaagctggtccccaactcctgagttcaagtagttctctcatgttggcctcccaaagtgctgggattacaggcgtgagccactgtgcccaaccaagataaattcttgactgtggaatttctagatcaaaagtttcagtgcacttactggttgagaaaacaccatcccaggcaccatctcccagtgctgcagaggggaagactacatggagttagaacagctagagttccaggactaaccccaccctgtcacacatcctttctcacttagctactgccagaacaccaaaccccttcaatctgtatgtctagtgagatcatgtaatttattgtctgaacttggacatacactaaactgcatgtcaggatgacacatacatgcggggacagccttggggggttttgtcatcttactcatgacccctattgttcaaagcacgtctcccataaatctgacttgatcctctgtacccctgcccctaccacgcccacacccatatttttcactgtggccttcaggtctgcacacagcagatctgcatacattcggtctctttgcgaaatgtttcttttgcttcctgaattcaccagaaatgcagctctccgttgtgaacactcttctccctttgacttggtgctgcattttaggtgttattgaccgggttaagggatacgcagaaacatttctgggtgggtctgtgagagtgtttttggaagagattagcattcgaatccacagactgagtaaagaggatctgtcctcatcaatatgggtggacattattcaatctgatgaaagcagggatagaataaaaaggtggaggaagggtgaatttgccctctcttcttgagctggggcatctatcttctatccttgaacactggagcttctggttctcaggccttcagactctgggacttacattactgagaccgctggttctcaggcctttgacctcagattgagagtaacaccgtcagcttccctggctctcagatcttcagaccaagactgaatgacaccaccagctttcctgggtctccagcttgcacacagcagatcatgggacttctcagcctccataattgtgtccagttcctataacaaatccgctgttacatatcttatacaaatcctattgcttcccttcctctggagaacttgaccaatacacaccctcttcaggggagctattttttctcttatactccttgtatatcagggtgagaatataaaattcaaaggcttccttcttgcatttcactgctatttccagaccatttatccatctttttggggctggggagttgggggaaggaaagatttcactctatctttgaggcttagactacctgacttgaaatattccctcctctttatggctgttgtctggtggcatccctaccactcctcctcatggctgaggatcgactgtcagctataaacatttatctctacatagactgccatcacaatgaccagcaacttcaacaattaacatgatagattggctctttgatagtattatgtagtggccgggtgcggtagctcaggcttgtaatcctagcacttttggaggccgaggtgggtggatcacctcaggtcaggagtttgagatcagcatgacctacatggcaaaacccaatctctactgaaaatacataaattagcttggcgtggtggcacgcctgtaatcccgcctactcagaaggctgaggcaggagaattgcttgaacctgggagacggaggttgcggtgagccgagatcgtgccactgcactccagcctgggtggcagggcaagactccgtctcaaaaaaaataataaataagaaaagataatattatgtagttactgttattcattttacatttgataatgtagtgtggaagttttttcaaagagtccctttaaaaattagatgccaatctgatatatttacacatataagcatgtgagtgtctggatttgcttccaatggtaaaggaagattggccatgagttgataatgactaagatgggtgatgtatggatggaggtttattatgccctctctactttttatgtttaagggttccgtaacaaaacagcaaatgaatctgggtgttccaaaccaccatgagctcttttttccttgactgctactcccatggaatcactcagtgtcatagtcagacttaaccttgtcagcccagaaattaccacctccaaaattcccatgtcatgcctctcattctcacagcactactgcctgtatttcaagctcccttacttattctaggaaattccagcattctcaacctcattaagagttccattttggctgggcatggtggctcacgcctgtaattccagcactttgggaggccgaggcaggcagaccacttgaggtcaggagtttgagaccagcctggccaacatggtgaaaccccatctctactacaaatacaaaaatttgccaggtgtgggggtgggtgcctgtagtcccagctacttggaaggctgtggcaggagactcgcttgaacctggaaggcaaaggttgcagtcagccgagatgccactccagcgtgggtgacagagccagatgacaatgtctcaaaaaaaaaaaaaaaaaaatttttttttaaaagtgctccatttcattgacccaaccaccacattctctcttgttcctcatcccctttgtgtattcatttgcctcctcgtctagcttaaatgatgttgaaaattcttgccacgtcttcaactcccttgctttttttctttctgacatacttgactaaggaaattctgacagttgaagtctactgtctgccatcctgggaccagtggttgagcagctgaacatttttaggagaaattcacccaaatgggctgacttatttatctttaaattcatgtttacaacatttgaactggcattcaacactgtccagtaacctaccaaaattttcctaatgtctgcctaccaagatgactaattcatcagcctctcctctttcatcaatcctgttgcccaccaattatagctgatgatatccttcgcgcatcactaaagtgataaaattaatctgagagaaatattttactttctgattaactaaatcttcaaacctcttacatctgcattcccttcttcctatctattctttcctttccctaaataacaatttctccacatgctgtcagaacaattttccttcccaggaacttagcttctttgatggtctgcactctgtctgcattactagtctactagtttacactggatcattcccaccagggcctaggctagctgggacttctcaaactgaaatttgcacatgagtcatctggaagtctcataaaaatgaaaattatgattcagtaggtctggggtggggcctgcaattcttcatttctcaaaaactccaagctaatgcatgggttcatgcatctcattctttgagtaacaaggctttagtgcattttagaatccaagtaacaggtgtacatatggtagaagtacaagcagaagtgatatgagaagtaccaagcacagcacaggtatcaagcctcaaaagaaaaacaggccatatctctgcagaagcaagcaccttagggccttctgctaggtccaggtcgaactgtttagtgtgcagattatgaactggtccagaactgtccagtggcagttgtggggattggggagcttagagcagtggattttaacaactgtgcttgagtatttcaacaatcagtaatttgtaccagtatgtaccagctgaatgcagcaaatatggtttggatattcatctccaaatctcatgttgaaacgtgatccctagtgttggaggtggggcctagtgggaggtgtttcagtcatgggggcagatctctcatgaataggggtgctgtcctcatggtaatgagttaatccctctgtgagttcacatgagatctggttgtttaaaagtgcctggcaccccctccctctctctctcgctttctctctcacagtgtgatgctcccgatcctccttcaccttccatcatgattgtaagcttccttagtccttgctactagcagatgctggcgccatgcttctcatacagcttgcagaaccatgaaccaaaataaaccttttttttttaaataaactacctagtctgagatattcctttatagtgatacataactaagacagcaatctttatgtcatatgacaaattttagaagaaattaacaaaatattcagagagacagctctgagctcaagttgggaagaatattcttacagtgccaaccaaaagtgaagtgggctgagtgaaaaataatttcctattcctgaaaggatttaatcccaagtgaagtatttgtcacagaatacatagagaattgtttgggttacagaaaaggggtccagatccagacctcaagagaggattcttagatctcatgcaagaaagaattcagggtgagtccacagagtaaagtgaaagaagtttattaagaaagtaaaggaataaaaaaatgctacgccacagagagacagccctgagggctgctggttgcccattttatagctatttcttgatgatatgctaaacaaggcatggattactcatgcctcccccttttagaccatatagggtaacttcctgacattgccatgacatttgtaaactgtcatggcattgtgggaaggtagtagtgatgatgaccagaggtcactctcatcgccatcttggttttggtgggttttagccagcttctttactgcaagctgttttatcagcaaagtctttatgacctgtattttgtgctgacctccgatctcattctgtgacttagaatgccttaaccaactgggaaggtagcccagtaggtctcagcctcattttacctggttcctatttaaggtgaagttgctgtggttcacacctctctgacatttgaactagataatttaagattccttgaaaccttagattcaatgagttctactccagtagagaactattatcactccagtgtcatcttaaaaaaaaaatctaaaactcaattggacttcaaattgcagtttacttgacgtcacagtttacagactgttcagattttttcagaaagaaaaattttaaaatatttaatggatcaaaaatagatattctttcccaatctttctaattcttttctaattttctttttctttccttattgcacctaataagtaaatttttcaagagcatagaaaaacagtcaataaacaaaaatcagtttctgaagactcgtggtaaacagttggaaagtgaaattatgataaagaaaaacatttacaagcaaatgcagccagaacatgatatacttagggataagctgaacaaaatacatgtaagacctgtttgtatacccaaaactacaaaatagtgcttgaagaagtaaaagaagacataaataaatggaaagatataccatgtgattggaagatttaatattgcttagatgacaatttttcccaaattgatctatagattcaatgcatccctgatcaacattgtataggctttttttttcagtagaaatttgagctgattctaaaatttatgtgaaaatacaaaatacctagaatacccggggcaatttagaaatagatgaacaaaactggaagacttacactacccaattcccaacctaccttcatcatgactgtgacattggagtaagactcaatggactaaaatagagaatctaaaaaccttgcttatatggtcaattaaattttttttctcttttttttgagacagtgtctcactctgttgccaaggctggagtgcagtggcaccatctcggcccactgcaacatccacctccgcgttcaggcaattctcctgcctcagcctcctgagtcgctgggattacaggtgcgtgccaccatgcctggctacttttttgtatttgtagcagagacggggtttcaccatgttggccaggctggtcttgaactcctgacctcatgatctgcccacctcggcctcccaaagtgctgggattacaggcatgagccatcgcgcctggccagtcaattaatttttgacaaagttgctaagaaaataaaatgggagaataatagttttttcaacaaatggtactggaataattgggtatctgtatggacaaaactgagcctcaatcatggtatcacaccatacgtgaaaattaactaagtaaatcattaaatataaaagttaaaacttctaaaagaaaacttctaaaacaatcttgaagtggaggcagatttcttagaacatgaaaattgctataacctatataaatgtgtaaataaatgggactttatgcaaattaaagagtgtctatcttttgaaaaactatgtcaagaaaccgaaaaggcaagccacagtctgggagaaaattgcaatatatttttctgacaaagaacttgcatccagaatatacaaagaactcgaactcaatgaaaagtcgacaaaatattcgaacaaacattccaataagacgatataaaaatgaccggctgggcgtggttgctcatggctgcaatcccagaacttgtaaaggccaaggtgggtgaatcgctcgagccccagagtttgagaccagcctgggcaatatagggagacgttgtctctacaaaaaataaaaaatgaggtgggaatgttgcttgagcccgggaggtggaggctgcaatgagccatgattgtgccactacactccctcctgggcgatgggagtgagaccctgtcataaaaaaataaataggtcgggcgcggtggctcatgcttgtaatcccagcactttgggaggccgaggcgggctgatcacgaggtcaggagatagagactatcctggctaacatggtgaaactccgtctctactaaaaatacaaaaaattagccgggcgtggtggcgggcgcctgtagtcccagctactcaagaggctgaggcgggagaatggcgtgaacccgggaggcggagcttgcagtgagccgagatcgcaccactgcactccagcctagacgacagagcgagactccgtctctgaataaataaattaattaataaggctaatattaccataagaagatgctcatatttatttaggcatcagaaaatggagattaaagccctattaagataccactacacatcctacctctgcgagaatggccaaaattaaaaagactgacagtgccagttttggtgagaatgtggagtaactgggactttcaggtattattggtgggagtgaaaatagtatggtacgcaaagctgcaataatcaaaacaaaactggcatggagacagaccatagagactagtggaatggaatagaaaaaacggaaataacccctgtcacatatggtcaaataatttttgacaaggttgctaagatcattcaatgggaaaagggcagtcttttaaacaaatggtactggaaaaactggatgtccacatgcatgacaatgaaattggtcccttactttacaacgtacacaaaagttaactcaaagcggatcaaagacctaaacataagagctaaaactataaaactcttagaagaaattatagcagaaaattttcatgatgttaggtttgaaaattatttctcggatatggcaataaaagtaaaaatagataaatttgactaaattaaaatttaaaacttctgtatatgcgtatgaatagccaaaatcaacaaatgaggaaaaagcaacttacacaatgagaacatacttacaaatcacatttctaataaggggttaatatccataatatacagtataaagaactcctacaactcagcaaagaaaaccaaacagtccaattttaaaaacgggcaaagaatttttttttttttttgagatggagtttcactcttgtcacccaggctgcagtgcgatggcgcaatctcggctcactgcaacctcagcctcctgggttcaagcgattcttctgcctcagcctcctgagtagctgggattacaggggaccaccatcacactaaggtaatttttgtatttttagtagagagcgggtttcaccagttagccaggcaggtcttgaactcctgacctcaaatgatctgcccatctcagcctcccaaagtgcagggattacaggcataagtcaccacacctagccttagggcaaataatttgaatggacatttctctaaagatgtacaaatgagcaacaagcacaaaaaagatgttcagtattactaatcattagggagatacaaatgaaaaccacaaagagatactactattaaaaaacctgaaaatagcaactgttgctaaggatgtggaggaactggagaaattcactgttggtgggattgtaaaatggtgcagatgctgtggaaaactatattgttttcaaaacaaagattgaatataaaattaccatatgatcaaaccactccccttctggttatacatcgaaaagaattgcaatcagggtctcaatgagatacttatccacccatgttcacagcagcatcatttaaaatagccaaaaagtagaagctaacccaagcgtccactggtggataaataaacaaaatgtggtatgtacatacaatagaatattattcagcctcagaaaaggaaggacgttctttcttcttcttttttttttttttttttttttttttgagaaagagtctcactctgtcgcccaggctggagtgcagtggctcgatctcagctcactgcaacctccacctcctgggttcaagcaattctcctgtctcagcctcctgagtagctgggactacagttgcatgacaccatgcctggctaatttttgtatttttagtagagatggggtttcaccatattgctcaggctggtctcaaactcctgacctcaggtgatccacccgccttggcctctgaaagtgctgggattacaggcgtgagccactgtgcccagccaaagaaggacattctgacacatgctacaacatggatgaacctagattcaggacattatactaagggaaataagccagtcagaaaaagataaatactgtatgattccacttatatcaggtacctcaaatagtcaaattcataaagacagaaaatagcatgatggttgccaggagctggggaatagagagaatgggaagttgtttaatgggtacagagtttcagttttgcaaagtgaaaagacctttggagattggttgcacagcaatgtgaatgtacttagtgctatcgaactgtatacagtcatccctcaatatttgtgcaagattggttccaagatcctgctcattgccaaaatctgtggatactcaaatcccttatatagaatggtagtatttgcatataacctctgcacatcctcctatatactttaaatcatttttagatcgcttataatacccagtacaatgtaaatgctatgtaaatagttgtcagactgtgttatttgtattaattttttaatgttgcattttaaaaaatattttgactgctctgcattcggatgaatctatggatgtggagcctgcagttacagaaggcctactgtacttaaaaatggttaagatggttacttttatgttaattaatttttaaaaattaattttgaatagtatggtacaacccctttggaaaacacattggcacttttttataaagtttttttttttttttttttttttttttaaaacagaatcttgctctgttgcccaggctggagtgcagtggcatgatctcagctcactgcaacctctgcctcctgagtagctgggactacaggcctgcaccaccacacacagctaatttttctgtttttagtagagatgaagtttcaccatgttggccaggctggtctcgagctcctgacctcaagtgatctgctgcctctgcctcccaaagtgctgggaattataggccagagccacgcggccggcctcttttctataaaattaaatgtacactttccataatatccagaaactccattgctacacttttacccaagataaataaaaacatgtcctcaaaatgacttgtatgcaaatgttcacagcagcttaattaatagccccaaattggaaagggccatcaataagtaaatggataagcaaattgtgatatttatacaatgaaatactttttagcaatacaaaggaatgagctattgacacatacaacatgggtgaatttttaaaatattatgctgagtgaaagaagccaaaacgaaaaagtacttactgtattattccatttatacaaaattctagaacaggccaaactaatctgtaaaggtggaaagcagatcgtgtcaaagggagaaaacaaaattgacccaaagggcatgagacgggggtgatagaaatgttctgtattttaagtgtgttgggggccatgtctgcacgcagttttggagcaagcaagcaatactctttcttggtcaagcaaatgaaagcgtttcccagattctgataaaaggagcaagagactctctgctagaatattgatttgttccctgacatttacagtgaggtacttgaagaactcccaccaaagctattcacaaatgtgaagctgcagagttttatgtacggtcgtgggtgttacttgccaacatttaccccgactttgctgtactctttcagcatgttgatattctcagtaattttcaggcctttttttttttcctttttttcccttgacttctcatcagctccaaacctcagatctctgtttccttccaatacaatttctgagtccagagtgacatgaagactgacatagctcacccacgaaattgaagtccattgaaaaatccccattgcttggcttacagtccacctttctgtatctcaaaagcatttgattaatctctcctgatttcccaccatgatccatgtggtggttgcaccaggcatcctctctcttcttcttcccacaacttgtctttctgccagggactttgcttccagtgttactgagaagataaggccatcacatgtgactccctcagttacacgttattcttcatgttatttttgattctgcgcttccagctttgccagcaacctaagcctaggtaggtgctcttcttctctgttcattcttggtgctgtagtggctggtgggggttcattccacatataagctattcattgccattaaggctttcacttgcccgttttaaacaattttattccatacaaaaatattccagaactttttgtacaagtcactgcctcatttaccatttgtaccaattgtactaattatatcaatgtacctgcccacaaacaatgtgtaagagggattttcactgcactcaacaatccttagagaggcaataaagcatagtgggtgaaagagctccaccaagtactagccacatgaccttgactgaattagtttgacttctgtgctttagtttcctcatctgtaaaacagggataaataataagacctagtagggatgagttgttgcaaagagtaaatggctggtagatggaaaacacttggcgtagtgctatataatagtgcttagtaagtgctatacacacactaaatctgtgcgtgttggtagctgaaagtagctctgttggggatttcttctataagtaataatgttgaacatttattcacatgtttttggtcatttgttttcttttgggaaatgccttttcaagtcctttgccaatttgtttttgtttttgtttctttttcaaccctggcctacagaactttgccaatttgtaatggcccacaaatatttcttcactgattttcaagctgtttatgagctacggctattaactttctgttatcccgttttattattcgaaaatagcttttcggtctgttattggcctttatatttgtttatagcatcttaacattttttttttcttctatgactagaagattctttccattattgtatcacttaaagtttctattttctgtattttctccttcctcccatccccagtctggcaactgatagaaagtgccttgagctctttggaggaaagtgcccatctgaagtgctcattattcaattttggggctgtttagtaaataataataatgtttctaaagagataactccatactgtacttgtaaatcaaggaatttgtcctccagtctcctcaaagagtgaggctattactagagaagtaccatcattggctgaaaaagatggacatttgaaaagccacatataacaaatgttaaaaaagaagcctccttcttgagattgaacactgtcttctgtagacttccctcaggaaatgaacctccgagagctgctgttgttgcctttgcttctctggccgtttgtcaagctaaattgagtggagctcctgtgtgttgtctgtttaatcgccctctttgacagaagctttctcattacctacctggccctgttgcaaaccagcgcctggaggcagacatattgcacaccatttcctccagggtcttgctgcaggttgtctctgggaagtaatgaaaatctggaatgttctcagtgggcgggcttcagacccactgccccctgccatgaaccctcagcaggccagcaatgtagtaaaagccattagtgaagaaatctggaggagttcacctctaggcaggatgatttgacttttggaagatattctggagttagccaagatatttttatctgaaaattatttctgtcttataactgttccctggaggctctaagaatagcaaaaactgacaaattttgtttttgttgtggtttactttcctttaatctgctaacgaatctttttggctccacatgaggctgtgtctctgcagctgcattcttcagggctgtttcccctcagtgtttggggtattctggcctttgatacagaatcttaatcttaagctgtcttgccatgacaggtgttcattttgcccaagacttcttagtttaggtgaatgtcaggcagaaactcttctctcttcaaaaagaaacattagagcagaataagaaaaagcaaaaccacctttccagagcctttttaataaagggattcttctgtgtttataggttgtttcatgaccttgaggatgacttgcaggcaaaataaattattcagaggttaccttggttttcaaattaataagcaggttgttaaaggaatgctttcaaagccctacttcttagatttcaaatcttacacgtctagcaatttgtttttctttttttttttttttgagacagagtctcattctgttgcccaggctggagtgcagtggtgcgatcttggctcactgcagcctctgcctcccaggttcaagcaattctcctgcctcaggcttccaagtagctgggacttcaggtgcatgccaccacacctggctaatttttgtatttttgataaagatgggttttcaatatgttggccaggctggtctcaaactcctgacctcaggtaatccaccctcattggcctcccaaagtgctggcattacaggtgtgagccaccatgcccatccaagtctagcaaattttaagacacacaagggaatatagtgggttgaacagtatcccccccaaaattcatgtctagccagaacctcagaataggaccttatttggaagtaggttcattgcagatgtcatttccataaggatcaagatgagatcatactggatttgggtgagccctaactctaatgagagtgcccttcttagatgcaggaaaacacacacacacacacacacacacacacacacacacacacacacaagaacgccatgtgaagatggagacaaacactagagttaatgctgccacaagccaaggaattccccgagccaccagagacttgaaaagtcaagaaaggatttttctttttcttttttggagacggagtctcgctctgtaatccaggctagagtgcggtggcgggatctcagctcactgcaacctctacctcctgggttcaagcaattctcctgcctcagcctcctgagtagctgggattaacaggtacccaccaccatacccagctaatttcttttgtattttagtagagatgtggtttcaccatgttgcccaggctggtctggaactcctgagctcaggcaatctgcccgcgtcagcctcccaaagtgctgggattacaagcatgagccacagcgcccagccaggaaagaacttttctaaagaattgtcagaattgtctgtgagagcatagccatgctgacacctttattccagtcttctggctctggatatgaaaaaaaataaaataaatttcgggtttttttgttttgttttgttttttcctgagatggaatcttgctctgtcacccaggctggagtgcagtggcgcaatcttggctgcctgcaacctccatctcccgggttcaagcgattctcttgcctcagcctcctgagtagctgggattacaggcgcctgctaccacgcccggcgaatttttgtatttttaatagaaatggggttacaccatattggccaggctggcctcaaactcctgacctcacgtgacccacccgccttggcctcccaaagtgctgggattacaggcgtgagccaccgcgcctggccaaatttctgttgttttaagccacctagtttgaggtaatttgttacagcagccctagaaactaatataagggggtttgatccttggctttatttacaaacttaaatttctttaaacaaaacggaagctaaggtatttgattacctttttaaatatttcagttatctaacaaactttccaagacacttgtgtcttgatttaattagctatttccctatttcgaacacctctgttgctttcatttttttcttgaaatcataaaaaatatagcaaagtgtacattaattgtaaactatatgtacatttctttgcaaaggtagactctggcattaaaactgttagcatttgggctggtccagtgtgcttggctgatgggagcacagtgctgatgagactaagatgccaattagccctaaagagagaaaagctgtgtcctccatggcccggctagaacgtttgattcacttaacaggtgcatgccactgggcaaccagggagagatgtacccatccattattgttaaaggataaaactcaaacatttatattggtttctctgatgacaccaactttatgttttgacaaggaacattatttatactaatatgtgaaaatagctaaagcttcattcagacattaatctcataggaaatgtttgcacaaaaggcagggagatggaagaccaagacttcacatgacatttcatcacagaccaatggcagaatgagctacagaatgcagttttaacactatatgtctagtggcataatccttctagctttaactggcagctttttttttctaggactaaagccaccagcataataaacatcttttagatctgccttcaccacagaactgtttttaggaaactcatctatgatcccaggattcactgtttgaaaggagttgctggtgttaccttcagagaccttaaattggtttgaaattatatagtcactaaagagattgtgattgttattttaagtttttttttttaatttgagatggagtctcactctgttgcccaggctggagtgcagtggcacaatttcagttcactgcaacctctgcctcctgggttcaagcagttatcctgcctcagcctctcaagtatctgacattacaagtgtaggccaccacacccagctaatttttgtatttttagtagagatggggttttgccatgttggccaggctggtctcgaactcctgacctcaagtgatccacccacctcagcctcccaaagtgctgggattacaggcgtgagccactgcacccagttcattttaaactatgcctcagttttctcctttctaaaatggggatcacaaggacaactacttgatggagataattaatacatgagtttaacataatatgctcagtaattggtacaaaaaaatagcataaataagacctactatttgatagcacaacagggtgactatagtcaatagtaagttaattgtgcattttaaaataattaaaagtataattggattgtttgtaatacaaaggataaatgctggaggggatggagaccgcattctccatgatgtgatttttgttgttttttttttttttttgagacagagtctcgctctgtcgcccaggctggagtgcagtggcgcgatctcagctcactgcaccctccgcctcctgggttcatgccattctcctgcctcagcctcctgagtagctgggactacaggcgcccgccagcatgcctggctaattttgtgtattttcagtatagacgcggtttcaccatgttagtcaggatggtctcgatctcctgaccttgtgacctgcccgccttggcctccgcaagtgctgggattataggcatgagccaccgcgcctggccatgatgtgattattatgcattgcatgcctgtatcaaaatatctcataagtgtgatatacatcctccatgtactctcaaaaattaaaaattaaaaaagaacatgcttaaaacagcctttaaactagtagccatatataaatgttagctgttacttcttctttaggctttggacaaggaacgtatcttttctgtgtaccagtctatttccagtgccaaactatagtgccaagcaaatagtgagtgctcaatgaagatttgcaagcgacttaatagcaattgaaggaacacagagggattgactttgccttgccttcttgacctgttttatgtttttgtttcccttaaactttataatttagggattaggagcagctggttgcttatgttcataactcaaaacacaaaaagagctcagcgggtctaacagggagcgcagcaatgtctttcactgcttagacggtgaacggctaaagtttatttccacgttaactgttttcattgatgaaaactggttagaacattatttttggagtgttagatactgaaaagattgactgtaaatccataattttcacagctgtgttctccaaaattttctttactcctacaagtgaagaatgaaaattacagaaatatatctatgtgtgcataggaagtcgtttgcttttgggaattctccagttggtaattcagttaatttgctacagtaacttacgatctccttctcagagttaacttcctgatcctcttgaattgcaggtgtatttgtcaggtgtggacaggcaggtctgcggttgggcttgcgtcttcctcaacagttctacttctgccaactgggttataaaaagctctgctgcaatctggtggtttaacttgaggtatagtttccccgagagacgacgttaggccttaggtttcataaccagaccaagcaattcaattaatcttactatccatgaagggtaattggatgtaaatagcactagagaatccagccatcgtttatgacgatcattgtaggggctgtttttaggctgtcaatttagtgagctagaaatacatctttcttaaaagtgaaattagggactacacttctctccatcctccatttgctgtctttgaaggtgaagtgataattctggccaggcgtggtcgctcacgcctgtaatcctagcactttgggaggccgaggcgggtggatcacctgaggtcaggagtttgagaccagcctggccaacatggtgaaaccccatctctatgggaaatacaaaaaaaatagacagatgtggtggtgtatgcctgtaatcccaactactcgggaggccgaggcaggagaatcacttgaacctgggaggcacaggttgcagtgagccgagatggcgccactgcactctaggctgggcaacagagtgaaactccatctcacaaaaacaaaaacaacaacaacaacacaaagaaagaaagtgatgatgcttctagtcttcccctaagtaggagatgactcctctggacaaaggatgagaatgaagagtcagggggaagcaggaagccctggaaaacaagaaccatctgctgggtaacctctgagcttagtctgccttttttgaagttcccagggcttgatttatggcacaccatgaactctgttgttacaattctttatttccaattacagcatgatcttcttattgaatgatgagttcctagaagattgatccttgatataccctttatcatcactgtttaatcacaacgcctgccacatagtaggggctacataattgttgaaatgaaatccctccagtttctaacctttcctaacctgttcaggagaattatataacttgataggttcttcactacctttcctgtcgctcaaggaagaactcagctttcttgatatatcttgtgaatttcattccaaaaaagtgaaataaaaatagggcatctatttctacccagaccctgtagagaacgacaacaggccatgtatctgataggtgtgttggccatgtgtcggtgtgctagcctgtgtgaaccttggtccctgtaaggagagggtatccccactaagtgagtccccgtccgtggtaattgtactctatgccagacagtcagataattctgagtggtagagatcggctggatttccaatgtaccctaacaatagactgtgttctatcctgccttggtttacctgagacgcttctgcatctttttttttttttttttttttttttttttgagacggagtctcgctctgtcgcccaggctggagtgcagtggcgggatctcggctcactgcaagctccgcctcccgggttcacgccattctcctgcctcagcctcccaagtagctgggactacaggcgcccgccaccacgcccggctaattttttgtatttttaatagagatggggtttcaccacattatccaggatggtcttgatctcctgacctcgtgatccacccacctcagcctcccaaagtgctgggattacaggcgtgagccaccgcgcccagccgaatcttttcagcctgttccaactcttacctctttatttgagttaccatgactaggactcaattgctggagataaaaaaaatcttgaccaagacaatacaggtagttctttaaggaccaaaaaaaccccatcttctacatttaagaggaaaaccaatctcacaggtctttacaggaacagagaaggacagcagggttagagatctgtacatacattgatcaagtcaggtgtggttatgtgctggacctcagttggaagagagcgaattatctagaaactcagtgaggaggaaagagagcagggataactactgatagtagagcatgtatgtccttgatcgtcgagaaggtgaaggcagaattcatttataagtaaagaagattcatggtatagagaccagatatgttaggggatgatggccttttattttattcctggtagactcacttgaggaataaacgtggagcaccagtggcttgtgcttaaatatgtcttctgtatattttgctcagtagaggcttaattgggataatttctacttctaatgtataaaaaagccagtggttagcacaatttccagaaatattcacaatgtgttccataggaatgatttccccctagtctcatttttgagactagaaccctctggaattacacaatatgggaatcttgtgtgtaaaaagtgtagaagaattaagcttactggtaatatacatcttgatgtcaatcatttgattcattttcttactttaatgatattaacctgtgagatggatttttgattgatggaccagggtagtggctttcagagagaatgccaagaacaccagtgtcttgctccgtcttaactcccaattaaaaaaaaaaacttttaaaataaactttttattttagaatgggtagagattttcagaatagctgtgaagatagtacggagtttccatatactccacacccagcttcctctgttattagcatcttatattaatatggtacatttgccataattaatgaaccaatgttaatattattaactaaagtcaatactttctcttttctttctctttcttccttccttctttccttccttcctcttttatttccttccttccttcctttccttccttccttccttccttccttccttccttccttccttccttccttccttccctgcttcctttcccccctccttccctccctcccttcctcccttccttctttgacagagtctcacctctgttgcccaggctgcagtgcagtggtgccatcacagctcactgcaggcttaaccccccagactcaagtgatcctcccacctcaaccttctgagtagctaggactacaggtatgtgccaccatgtccaactgattttttgatacttttgtggagacagagtctcactatgttgtccaggctgatctccaactcctggcctcaagtgatcttcccaccttgacttcccaaagtgccgggattgcaggcatgagccactggacctggcctaaagttactctttattttacttctttttttttttttttttttaattctagggagctatgactgcaagggctaccatatgtttattgtaatactcaatggtttcctctatgtattgaagctactctattctgaatatggttcttaagccttcctaaccgtaaaaatcacattggagctttaaaaatgcatgttgctaggttcccccactgaagatcctgatttatttgggcaagggagtcgctgggcaagaacctacctttttttttttttaaaaaaacaaacacaggtgatgctaatacaatagtctctagactacatatattttgagaaaatagacctaaactataaagggaaattaagaaatccttagtaccacttagaagttgccatatctatttctgtgatgctaaaggaaaattttactgtaagttgttttttttggcatcaccccagagcataacacacaattagtatctaactcaatcatttctcttcttaaaagcactttgctgtccctcttggatgggcagggccactttccaatgtgctgcaatagcattttgttaaaaccaacatctcatgttaacacaactatttgtgggcttacacaacaagaatagatggagaaatatatcccgggaaggaaaatattattattaaagaaaaacctcaactgactagccacatttttatcctgtagggatagcagaattcacatcatggaaatttttatgttttcctttagaaaaactacttacggagccctttggttataaaacaaaaaggcccggacccatctagattagagaagaagaaagggagctaaactgatcttcatgatgaacttcaacggagtcattcctgaggatggagggaatgatctatgctggaaagggctatgtgagttttctttaaccaggctccagaaggaataggtttccaatccctggaacttagagaagccagtgcagaaatgggctgaagcaacgtgatgaaagagtgagatgctacagaagagacaaccagggagaggttccctggggcagagaatggtggatgagatttaggatcagtgttgccagattctgtctgttgcagattattgcctttttatcctagtcctttgtatacaatagccttgtgttagtgggtcatgttttaaagcacaagaacaaggcagattggacagacctaaagcagtataaggaggtagagtcagatggcccaaaatgatgaaagagaggattggagtaggagtcgggtctgggactcctcagaattataggtgagtgtgctggatatcctcattcatatgcatggcacttcgagttatttgatctggactcataatggcagacagacttaaggactcagggttatattaacaagaaataccctaaagattcttttgtcttcctgcagatctgaaagatgaatattgatagaaacttttgtaacaaaggcatatctctcctaccatttttcctctgattatgttgttctagttgtctgtgattcttattgtcagcacagtgctgaattttcaaatagactcttgcttatgaagctggcagtatttcattatttatgactttgttcaacttcatctagtctaaacacaaagtagatagaagttgtgtttttctattgctgacagcaaaattctcttgcgtgaacatatttctttacacagacaaaagatgttgagcaaggcatgatagtttttgcacagtacagctgaggaggatggatggaatgactgctgcaatataagaaactaagaaaaaattcagggcaaaagatcccaatctatataagctagtaaaactgggatataaacatgaaaattaaagagatacattttcctgtagcctttgtgccataaattatatgaaaagggtgaccaatagaagagagaaatttgttctttaatcctctgggaaatgctaaggagtcatttctttttttttttttttttttttttttttgagacggagtctcgctctgtcgcccaggctggagtgcagtggcgggatctcggcttactgcaacctccgcctcccgggttcacaccattctcctgcctcagcctcccgagtagctgggactacaggcgcccgccgccccgcccggctaattttttgtatttttcgtagagacgggggtttcaccgtgttagccaggatggtctcgacctcctgacttcgtgatcttcccgcctcggcctcccaaagtgctgggattacaggcgtgagccaccgcgcccggccccttagcaattttaaggtaacatattaataggttattgggattaggacatatacaccacagattgactatagatttcatgttccaattcattcatttttttcaccagagccactgaggaaatttttaatataagtcatgaaaaacgatggggcaaaattggaattgcatgattccttgcttccagtaaaaaaaaaaaaaaaaggttaaggattaagtaaaggactaatttaaattgggctccctactccaaccaattattcagattgtctcatttgatagcctcagggtgctgctgatactgaataatttgatccttgtctggaatcttttccttgacttcattattatacttgttcttatctacctcaggttgaaatatatgtgatggtcatggcaggtttcttgataaaagaatttggcttgttttttcaacccatcactagaaggtaccttttggagctatcaggtcatggggaaggctgttctggtaagacctgtccagacttagaaaaccatgacaattagcacccttagaagaggaaaatttggcttagaggcaggtaacagagactctctttagagaaagaaagggttattaaataatctagtgcaacacaatctaatagaagtacaaaataagccacatacataatttaatttatctaaaagccacatgaaacacagtttaaaaagcagatgaaataaatgtttatagtatatccaaagtatcatcatttcaacatgtaatcaacataacaaattattgttaagacacgttttaagttctttttctatacactatgatttaggatctggtgcatacttcatatgtacagcacacctcaattcagtctagccacatttcacttgtgctacagccacaagtggctgctagcatctactacattggttagagcctagtagaagcttattgtacttaatggacatctttagataaccttgtttattgagtccttcacagcattctctactcttatccacatcagttctaaagcttgacgccccttagatgagatagtggccacaactgtctgcctcaacaccaatgtactacttccttttctcttggcaatatccactagagaagcaagaaaaagtagcactcacctccccattcttctttgcagctaggggtggccatgtgacacaattgtggtcaatgagtggtcagcaaaattatgatcaagggtttctggtagctggtgcctccccttccttcttctgggtgttctgaatgtgaggcctggaactgtagaatcccgaataatctcaaagacacatgggctgacaccatgaaataattgaaccaacgctaacattcaccaacctccacatttctttctacaaaaatcactgggcacagtggcccacacctgtaatcccagcacttaagggaggcaagccaggagttcaagatgagcttgggcaacaaattgagaccctgttgctaaaataaataaataaataaataaataaagttagctgggcatggtggtgtgagcctatagagtaggctacttgggaggatcacctgagcccaggatttcaagcctgtgatagtgccactgcactccagcctgggtgacagagcaagaccttaactttaaaataataatacactgggcacggtggctcacaccagcactttgggaggctgaggaaggcagatcacttgaggtcaggagttcgagaccagcctggccaacatggtgaaaccctgtctctactaaaaacacacaaagtagccagtgtggtggcgtgcatctgcagtcccagctactcaggaggcagagacatgagaatcacttgaacctgggagacggaggctgcagtgagctgagatggtgccactacactccagcctgggtgacaaagccagactcatcttgaaaatagtaataatagtaataataataataatgaagaaaacaccataaaaaccttaattatttaagccattgttcgtggatttctctttgacttgcattttatttcacctctaagtgatgcaaaactttctggagcctgctctgaacagactacactcctcgtttgccctctggcttcctgctagctctgacaatggggcactacagggagacaagaaagtaggaggaaggagaaaagactcccattttccttttttgttccaatcagggttgtcctgaaatacctagggggatttctaattccttactggactctgactgatacatcccctgcggcctcttctctacatggaatttagaaagatagttttaggctaggcgcagtggctcacgcctgtaatcccaacacgttgggaggccgaggcaggtggatcacctgaggtcaggtgttcgagaccagcctagccaacaggtgaaaccccgtttttactaaaaatacaaaaattagccgagtatggtggcatgcgcctgtagtcctagctacttaggaggctgaggcagaactgcttgagcccaggaggcagaggttgcagtgagacgagactgcattactgcacttcagcctggatgacagagtgagactccatctcaaaaaaaaaaaaaaaaaaaaaaaaacaaaagatagttttaaagcataattcagttcatatatacagtggcttctgatatcaataaaaatgaaacccaaagtttcttctacagccagtgagatgttatttctttgatcctttctcctacctctgctctgacacaactgtcagaggcatttgaactagagtgactccatccggaacaggggctgggtaaaataaggatgaggactgctgggctgtatttccaggaagctaggcagtcttagtcacaggatgagacagtaggtcggtacaagatataggtcacaaaaccacctcctgataaagcaatgtggtaaagaagtgggccaaaacccaccaaaaccaacatggtgatgacagagacctgtgggcatcctcactgttcattagacactaattgtagtacattaaaatgctaaaagacactcccaccagtaccagttttaccagtacagtttacaaatgtcatggaaaggtccagaagttaccctatatggtctaaaaaggaaagcaaccctcagttttgggaactcctcaaccctttcctggaaatctcatgaataatccactcactgtttagcatatgattaaaaataaccataaaaatagccaaccaatattccttggggctgctctgcatatacagtagccattcttttatttcttcacttctctaataaacactcacttttctctgtggactcaccattaattttcttgcacaagatccaagaactctctcttggggtctgaattgggactcctttctggtaacacaatcacccagagttccttcctcttccaaatcaaaccaacccaacatactgtcaccctagggactctgcctgtaatagtccttccggatggatcctcactttgctccaaccctccgttggttcagccctctgctcaaataccacctcattagcaagggcttccctcaccacccctataaaacacagttccctgtccctctcaatccactcacctgctccttgtttttccctagtagtttccccacatgatgttttgaaactgccattgcaaaattataaccgagaaaattattacagtgaaagagagctgacctaaccaactttgtcttgcttctaaactcctagctgtcgttgttcactcatgggtgtaggccaaattaactttgggaggaacttagtttatagtttaactttgaaacaaagatgataacagccctttcccaaaacaatcccctttccttcctggggactagactgcttttgcaggactaacaaaattggccaaatgatgagaaattatggtttaggagtcatgcagttggaggttacaagattctgaccctccccaaattgctcctggggataacatcactattgtaaaacctaagatcagtgcttgagatattttgcaaaccctgcacttgatggatcaatatactggctcatctggtcttgtggccccacctaggaactgactcagcgcaagaggacagcttcaactccctattatttcatctctgacccaagcaatcagcactctcaactcactggctcctacctaccaaattatccttaaaaactccaatccccaacgaatttttggggagactgatttgagtaataataaaactcccacacagccagctctgcatgaatgactctttctcttttgcaattcccctgccttgataaattggctctgtctaggcagcgggcaaggtgaacccactggtcagttacagttttacatgcttgtttacccatatattattcatctctcccaactagaataaaactccaaaagggtaggaactttgactattgcattcattgccttatccccattgcctggaacagtttctgagacaggactcatgggaaaaggatcagtaggaaatggaaagagatggtatcagtttcaagtatgatgattttcgagttgccccttgaatattcctgtggacatacccagttgacagagacacttgagtctggagctaatggaagacatatagttagttgaattagatttgattaaagctataggtttagatgagaacatccaggaatggttcatagaaagagaggagagtcatgataaaattgcacaagacataatatcaaagagagagattgatacaatgatagaggtaggaggcagagaaattccaggcagacagggacgggtccctgacaaaactccaccttcaagccgaaaagcctgaaacccatggcccaaagtgagaacttctatccattttcctgcttaaatgttgccttttcctaaactacccatgacccaccccaccccccatcctgtgcctataaagaccccagactcagtcagagagaagtgacttgacttcagagggatggcttgatggcttgacttcagagaagactggccagagatggctggacttaaggggaagattacttgcccatcccatcccctttccaggtccccttcccctgagagccattttcactgttcaataaaatcctctgcattcaccatcattcaactcgttcacacaacctcatttttcctggaagccagacaagaccttgagagctatgagtgcagacaaccaaaaaagggctgtcacactggccctttgccgttggtggtggagggcagccgcctcatgtgatgaggcaaagggcccactgaactgttaacacttaagccgaacgtggctggcagagctgaaatagcactgtaacatgtcctcttgggcttcaggggtcttaggtagccccacttggatgctgccatggggcctgcatagagtttgctcctgctggcacccaaaagcagctggccagatcccgtatttgcttgcctacttgcttcctcccacaaggggttgagtgtggcaagctgagtaaatggagtttatttctgccagcactcaaaagtgctccctctggttcctgcacttgttcactcatattttgcctcctgtgagaggtagaaaggggtgggctgagtaaacaacgcacccctgtcttgaattccacaaaggagtcaagaaaatatcctgcttcaataccaggggggctatgcagcgatgttatgaatgaccatcagattagagagaagtggtgctgcagaagtcccgagaggagaaattgtccaggggaaggtgactcaatgccacagagaagacaggtgagatcaggactaaacttgcccttttggtttggtaagcagggaatgtaagccaaaaataaaattctaagcccttccagctgagtgacggacccctccctgccccccatctctgccaagggcattccaaagaattatgaaaaactagtacaggccgtgatgggaaggaagggtctgacacgcctcattataccctcctccctttggaattcaggtatgactaaccagcactaaccttaaaacagcaatcttaggactgacaaaataaactccttgtagcaataagataccaacatgacagataacaggccctgaaagaaatcaaagtattttacctgaaaacatatttctttgacatattttgaaatggcccggcaaaactgtatcttaggggaaaatctacattctgtagagaatcactttccttttccaggtcttttccctcatccaggagataattaactaagagtctggcacctttttaagtgtgataagaaacatttacagtctattctctgaaacctgctacctggaggcttcacctgcataataagaaccttggcctccacatccccttgtcttaacccggacactcccttctgattccaggtctttacataccacctttactctttcaaacaattgtcaatcaaaaatctttgaattcacctatgaccggaagcctccctcttcacccctctacccctgcaacatacaccttacatgtattgactgatgtcttacgtctccctaaaatgtatgaagccaagctgcagactgactccctcgggcacgtattcttaggacctggggccgtggtcactcatgtttggctcagaataaatctcttcaaatattttaacagagtttgactcttttcctcgacaggaagctttgtcaatgctggtgagggccattgtgtaatgatgaattgagagttttgtggaaagccagattaccatggattgaagagtaaacgagatgggagagtgtgggtttatcttttgtaaagagtgtctgaaaggaggaaagacatttcctaactacaagacagattaggtcaaaagcaaattgtcttttttttggtttgtttttttaagaggaaagatagttggatgttccacacagcactggaaatgagtgactgttgctgaggacacaggccaaggccgacttggaaggcctctgtactctatgtgggcaccatttccagactcgctgttgtgcaaatctgggttcatagaggtgccttgctgagtctctggtactgtcttttcagtaagtcctcttttgagacatgaattgaaagcaccatagaaacaatggaccctcccactctgctctgaagcaggcctagcccctgactccctacgttgctgggtggaagccagtcctctctccaattttgcagatttgctatctaaagaatttgcaggccaggcgcagtggctcacgcctgtaatcccagcactttgggaggctgagggaggtggatcatgaggtctggaaatcgagaccatcctggccaacacggtgaaaccctgtctctactaaaaatacaaaaaattagccaggtatggtggcaggtgcctgtagtccaagctactcgggaggctgaggcaggagaatggcatgaacccgggaggcggagcttgcagtgagccgagatagtaccactgcacttcagcctgggtgacagagcgagactccgtctcaaaaaaaaaaaaaaaaaaaaaaaaaagaatttgcaaaaccttacacgttcctctttttatgtgtttcctgcaagctgcaggtcacatattggaagaagatccttggaacagagggattggtatagccctgagcttcccaaggtaaacacacaagccaagtcctagcagcaccaggttagggtaaataaaaaatttgaaaggagcaaacttgcttttgttttaaaatatcatagtttaatgagaaatttgagccttggtgactgtcttaacccttttttttgtgaatattgacgataggccttgatccatagtatgccacgggtacatgatcctttcacaaatctatggtggtgaaaaatgtctctttataatgtgttgtgtactggtaatctgaggctggaagagttgtggatgtggtaaaaatcagtctttgtggttggcccacattttttttctttggcctctggcaactgcaccctgtgtgtgtgggcataagaacagtatggatccatcaccttactggcttgtcagcaattacataagacagctccactttcactgagagtaacaataataatttcttctgaggacttttctggaaatgaaaacactttaagcaaaaagcagtgatctaatttggaagcaatacctagcagaaagtgtattcgtttcctagggctgccgtaaaaaaaaaagaccacaaactgtgtggcttcacacaacagaaatgtattctttcccagttacagaggccagaagtccaaaatcaaggtgttgacaaggttggttcattctggaggctctgagggagaatctcttccatgcctctctcccagctcctggtgagtgccagcagttcttggtgctccttggcttgctgatgcctgactccaaatctctatctccatcatgtggcattctgtctggatgtctctgtgtccctgtcttcacagggccttcacatgacaccagtcattggaactagtgtgcattccaatccagtacgacctcatcttaacttggttacatctgcaaagaccctgttttcaaataaattcacatgtacttgaactgggggttagggcttcaacatatctttctgcgggaacacaactcaatcaagaacaggaggctattgagaaataggtatttagaagagctcagtaagaatccacatttagcatacaaggaaggaacatggtatgctgagtagtgaattataacttttatgtattcaagctttggtaaaagctggaatccctctggggaaattaagaaaaaaaatcccactttgatagaggctgaaattcttggtagtggaaagcagatgagcccactctgtctagcacatatagcagtttccctctctttaaattggataagtctggcctggaaactagaaatctcggttgacagccataaaccacttagaagtagtcagaattacagtcatttgcaatataccataccctataagaagagcatctccttaatcataatatccaactctcagactatccttttatagacattgaggctacaaaggcattttcttgatggattccatggtcccgggaacttctcagaatctgcatggcttattctgggaaatttgccagacctcagccttttaaatttgtgtaacttacatgatgaatagtgtattgtgtaggaaagcctatcaaaataaaccaaatatttcttctttccttatgattagaaaacctgtagtttgtctctccgagttaggcattacattatgtttcctctgggttcatttcattttataatttaaaaaaactatagtgtattattgtctatctgtgccattattttccttgagtttaaagatgtcacatcaaacagaactcttttttgaactgaatctctattactggggacctgcacgttttgaagctggctaggactaaacattttcttcataccagctgtcacaaataattcagtctgctaaattctaatacactggcagaatgggtgagcagtcccttgaaaagagaattttaaatatcagtctcttctctcttatatcagtgttcagaaattccagtgaaaacatttggggaagcagacagaattagtaataatggaattagagtgctttccacatgcccattttgtgttgatctgcatttaggtggaggttagaactcagtccctaagtcttgaaagtttgatggcatgcagagcaatgtactgagactatgggtcccagtcctcaggaatcttattgcctcacccctcaagaagaaaccaatggtactagtaacgacaaaatgctggagactgtattagtttctttttgctgctgtaacaacacaaaattattatcttatagttctgggggtgagaaatctgatgtgatctcggctaaaaattaaggtattggtatgactggattcattctggagtgctctataggattatatgtttgctttactcttccagcttctagaggcgtcacattacttgactcatggacccctctcaactttacaaccagcaatggttggccaagtctttctcatgttgcgtcactctgacagtgacttatgcctccctcttccacatttaaggacccttgtgattacatgggccacccaagtaatccaggatgatggatccagccaattggcagttttaattccatctgtaatcttaattctcacttgctacatagcctaacatagtcacaggttctggggattacgatgtggacatcttgggaggttgttcttccatctaccacagaagagagtaaatatatcccagaggtcagtcacgtgtcctcttctgatcagaaaggtaggaggcttagttctgaactgtgctgctctgtaagtgtattttactgagtcattctggcactgggtgcagtgagagacaatgcaaattgcaaaccgtatccaatttctgcctcattactgttaccaaaatgccaggggcctgctgctcaccacacagaaagctgatcactgagacaatgagtattatcagggaagaaggctttcattgcgtactgctgccaaggagatgggatgcaagtctcaaattgggggttcatatagcagggaagtaatgtagccacatatattgtgttagtttactctcacattgctataaagaactacccagccagacatggtggctcacacctgtaatcccagcactttgggacgtcaaggcaggtggatcatttgaggtcaggagtttgagttagcctggccaacatggtgaaactccatctctattaaaaatacaaaaatcaacctggtgtggtggtgggcacctgtagtcagtcccaactacttaggcaactgaggcagaagaattgcttgaacccaggagatggaggttgcagtcagccgagatcatgccactgcactccaggctgggcaacagactgagactctgtctcaaaaataaataagtaaataaataaaataagaactacctgagactgggtaatttataaagaaaagagactcaattggctcacaattccacaggctgtacaggaagcatgttggggaagccccaggaaacttacaatcatggcagaagggtcaaggggaagcaagcacgtcttcacatggcatcaggagagaaagggcaaagggggagctcctacgcactttcaaataaccagatctcatgagaactctatcatgagaacagcaagggggaagtccacccccatgatgcaatcatctcccaccagctcccttccccaacattgggaattacaattcaacatgagatttgggtggggacacagagccaaaccataacatacaggaaatcaggaattagggggatgtaaggaagaggagttgtctaaatgcagtgatctggtgagtttcagtttcttgatactatctgggacgtctggtggtcagtttcctgggaaagatactcaaattagacaaatgtaagtttcaagttttaagaccaggagagtcagtttctatgtttactcaaaaagatcacaaacatcagttctacaaggaaattagccagtttcattatttcctccattaccccctaaacctgagcatgaaattgtcatcttttccagtagctgggaaaagctaaagatcttgattttaaatggcaaatctaaagatcttaagaagggcatcaagcagatgcccttcccactcttccatcaaggaaaagtgtctgcttccttgttcatagatgatgccttcttgttgtgtgctcacatggtagaagggcaaggggcctctctcaggccccttttataagggcactaatcccattcctgagggctccacccctctgacctaatcacttcccaaataacttcccaccttgtaataccgtcaccttagtggttagaatttcaacatatgaatttgtaggagacacgaacattcacagcatagtagatacgcaccacatcgatgcaagatattaacagcaggggaaatgcatgcagaaggacaggggatataggaacttgctgtattttcagctcaatatctctataaacctaaaacagctctaaaatataaactctatttaaaaaacaaaaatgctgtctagccagtgtcttttagggtccagatgtgggggccatttacattttggactgcgtagcataaaggaaaattatgtaaagcatgaactgtgtaagctctgacaacatgtccttgtgggcaggagcagactgcaatttctgaggcatataaaacacggggtcctctgcaggaaaagaataaatacaaaatgaagtaggaaataaaatacttatttggaagaggctttgcaagtgagggatcctgacacttaagtttcattaactttatgacatctatcttggcttgtgcgtgctgacacagagaaagtaggggttctgagggaggacagaatgccataaacacagagagagaggcaaagccgagagacccagagaaagggagagaaatcatttgagggccttcctttctacttttttgttgcaggttttattttcttgtgaagccgaaatttgctacccatgagtattaccaacaacgtgcccctgttagcttaaactaatgtgttggaaccaaatacccagcagacgcaatatcccttatgaggaggggaggggcagttggaagtggttccattttgtaagtggcaccactgaggcagaaagccaagcagtaacctgctcaagaaaggcagtatagtatggatggttcaaacagagcctacttctttgattttcagtccaatggtctcttcattgtctttggaggggagttaacacctcctgagaaagccagtgcattacgatctcattacttattctctgcccacatgactggttctgaggttccttgaaattcaattctgtctccgttggagactgagaaataatgaactgaggataaaccagggtaggtgtcatcacaagatgacatttttgacagtatgtccagaggccgctgttcattacagttgcttgttgagacctcctcctgccttccactggagtgatgtgcagtgagggtatttctgtaacttttcctccaggaagtttcctttccactttgatgtaacagaggaaacagacagtcttaatttaagctgaattcaactgtaggctccttaagccctagagttaggatacaactggacaatgtggcaaaagacataacacataccgcagatttgttagaaagaatgcatgcggcaagcgttggccaattattccggtgtcacctggggtggcatgttattttatgctgtggcgctattgctagtgatggccgctgtgtatttgctctccaaatccatggagatagttcaatgcctttttactgtgtacacttggcagctgctaactgcagacataagaacagaatctctgagggtagatggagaagcaagttatgtgaccatttttctgtgttctcaatgccctcactatacgtaaaagtaaagaatacaatttcacactctctctctttttaagcaattataagatgtccaggtcagtgctgagagatttccaaacactagcacaaaaagttcctgaaagtggtcttggataggaggaatgattactctctccactgaggcaggtggagaagtggcagacacagaattcaaacctaggtctccccgactgcagtgatctgttgcccacccactgttcaaccttccattatagtactcaccgaatgccttcccagatggggtcctcaagtccctgcaccatgtgtcatctttgtatctataatatctagctcagttcttcttactttctgacacagcgcctcactctgttgctcaggctggagtgcagtgacaccacataactcactgcagtcttgatttctcgggttcaagctatcctcccctgtcagcctcccaagtagctggaatgacaggtgtgagccaccatgtctagcctcaacgcttcttaaaggaagtgagtgaatgaatgagttgtagccccagctttgatcgagttgctcagaatgtcataaaaaaggtggccatgtggatgttttggtgtcctttttccagggggatttcttcctgtgctggaggttctctcttgaaagttaatgggtctcagcacagtgcctgaagtgatttgtgggttggatcctcttaggcaagagcccatctgtgggaatcaatgtttggcttatccagtagacaaattagtctgacatcactatccctttgagggacaggctgttgtctccttgtcaagagtggatcatttgctgtttagttttccttcggtacagaagggcttgggtttgggggtgagtgattcagcacttggttaatcagctattctgcatggcatcaatgtttttgaatttttgaaataagtcttgtggattcctctccactcctcttctgtttagcaccacctacaccttggtaactctgtctgctgacactcgttctccttcagtttctcccccacattccctttctgctgcctgatgaatctctggggaaaaactacctctcaaggttttcctgtcaaatgttccctggtaatgagaacagagctgagtttttgggtcgttgctatggagaaagtgtgttttctcattgccctattatatttgagtatgttcccagtctgaaatctgtgggtgacactgcatttgcaccccctttttaggtctattgtatctcaattatataagcctcagtgtgcttttttttgttttatttttaacagtttttatgttccccttttaccacccagtataacaggtggcctcacgtcagtggttgaggttgaagaccatgaacctaatatctctcctgcattatattgcatgcattctgctgctcttcatgcagaaagaaaacattcaatttttagattcatgtgaacactacagaaataactaatatgtgatgaacactggctccttccatacttctcacatctattggctattcctgtgcttctaactagtttttatttaacaacattgaatgcttaggcactgatagattctagagctttacctttctttcttcctttttttttttttttttatagctgaaacctttcttctatggaaatggtatgaaaacccgacagggaaaacaaataaccgaggtgagagaaaggggctcagagctcaccactgctcttgttccttgcaggggtccgtcaggttcatccacagaacatcttgggctggcagagttcagatggaaacccactctacaagttgccacaaaaatgaacagactacacggattttgggagcttacagctgaacggggaaaatgttatgtgatcaacacgcaactcatagtcaaacaatgtcctaattgctttaagagcagtaaggtagaccctgagtgtcagacagtatggtagataggacagtgggcattggagatctggtcagaatcctgattcttcaactctctctgagcaaatcaacttgaacaacttgaacttctttgaatctgtttctgacttgtaaaatgaagataatgtgacctacttaactttttccagatttgttgacaggatcaggcatacgattgagtgcaaagtacttaatccagtgtctggcttattgtcaaagagagtattgataaagacattcctcacaagaataatagctaccaccattgattgctttctatgtagtagtcacagcactagacagaactaggagtcttgcctcagtcatctcagtgtcttctctaagcctcttcatgagaaatcttacaaatcaggtcattaaaatacaggcttaatatcttattcatgtatttattcattcatacaacaaatatttactgagcagctcttaaatgctaggcactggtctagtcttgggggacactacagagatctctgccctcatagattagatgttgctttttttttttttttttttttttgagattcagccaggctggaatgcagtggcgtgatctcggttcactgcaacctgcacctcctgggttcaaacaattctcctgcctcagcctcccgagtagaagagattacagacacccaccagcaaacgcctggctaatatttatatttttagtagaggaaggggtttcaccatgttggccaggctggtctcgaactcctgacctcaggtgatccgcctgcatcggcctcccaacatgttgggattacaggcatgagtcaccgtgtctggccagatattgcattttaatggagtaaacagactataaaacagttgtattacttggatggtggttcaaacagaaggaaatctctgagatgaccctcaggttttaatcttgatgtttttacctgataatcaagatctggctttgctcaaggaatctactccatatttaccctctgagttctgagatgattcttttctcctggagttcataatcatgtcacaaatgccacatttatcaatacatgtgatttaaggtcccatatcatctctttgaaaaaaacttgcttggagattctgtgcttgttcatgcttcccaattcagtccatgcatccaatccaattttaaatgtcttctcttctgggaaactgtcctaagtcctttaggtctcccctgatcctagtacagacttatgtctgtcatagcagtaagccttcaatatcccaattcgttgtttatgtatctccctccttactgttctctgtgtttcttgaaggcaaggaccgtcttttatttattccctttgtatccccagaatctagcacatatagcactccatttttttaagctgatgatgaagaaaaagaccaataaaagatctgtagaaatactatatgcgtatttacacaaatgtctatacttagggggaaagtacagctgaatctttcaatatgttttaccacctgctctgtagatgctgtagattggtggctataacttgtgggtctctgtggttggtgaaggtggtggtcaacttggtatttctaaacaggtctttgtttgcatttatctatctgcatttgcttaccgcgagctatgatatttagaaatgtgcttctaatactgttatctcaaagttcttgctctggaatgtaagcatcttgatttagatacagagaatgataggcaatgaaacctgcctgaaacgaattagctaattggtttcagttctcctaaagaatgaattttcatctctgtcctgtcttctttcttcagatcagttcaggacctttctgatgtgatttatcataacagaactgtaatttacatcaaccatctgaatgtccctatgtaagtggatcggggattacttttacttgcttcttgcgtgactcaattttggagaacactcaactgtttactgtcagaatctgttctcgaatgagacagatgtaatatgaaaagttaacagtggcctgtgtctctatgatgtttgctccctcaatctgttatgcattgttttctcaaaagtcattttctaactcccgtgaatgtgattcattgatgatctctgcttcagactataaagagggcttagaaagaagtaaacactcaagagtttaactggcttagtgtttggagttgcccttactgggctcaaaggatgccacttgcctgtaataaccagccaccccaagtcagagccagatggaggtgtgggactacaggcagaatattaagtttggcacctttccaaacaaaagttctttaaatattttccagcataggtaaagaggagaggctaagagctgtgttggagcaggaaaaggaaggaggacatgggggttgtgctcagtttctttgctattgctccaagaaactcagctttggccccagcttttgtaacccacatagctaaacaaactgagcaggttaccacatcttcttcttgggccttgtctcatctctcaccctagcagcagcttctcaaagtattcttccccatcacatggagtatcttctgagatgtgcacaaagtacccctttctccatctagtccatgtctagtgaagttttttttttctaatcatgtattagtgtctcttacagactgaaacctgggacagaggcctcatgccccttgtcagtcttgctccagataaaaatctcatttatgtgacacactttatcctttaattcttcaagcctgtactttgcacatcaagcttctacaagagtagttggtgcttttgtcctgaagtcaaattctatgctttgttctcaagtgggtcatggaccccatcactaaagcacagaagagaaaccgctgcctcctttcggcctatctatattccgctgggctataggcctcacatcttcaccatgcagtatagtcctcatgaccttacagccacacaccctagccccactgctctgaaatccttggaccagccatatgtgccatgcaacattaccttgcctgcactctggcttgtcaccttttcaaacagcagaggagcctttgcttaccccacctgtggggctggtttttcctgtagctgagcaggaccttcatagccagttagtatctgcttctcagatggggaaggtttactaaaagcactcaacagaggccactttcctgacagctgactgcatcccccatgggctaaaccatctaaatctccttcggcaccaacccatttgctttacacctttaagatctcatactatgctcaatttctcaccatcatgcctgagactccgaagattaattccaccaagtctatgttaactgtcctctagtttttctgatgctctgtttgtttccttcacagaacttcacatgttgtaattattttcctgttcctttgcctgttaatttctttgccccttgatacagtttggctcttgtgtccccatccaaatctcatctcaaattgtaatccccacatgtccagggagggacttggtaagaggtgattggatcataggagtggtttcccccatgctgttctcctgatagtgagtgagttttcataagatctgatggcttaaaagtggcacttcccccttccctctctctctctctcctgctgccatgtaagacatgccttgcttccctttcatcttccaccatgattgtaagtttcctgaggcttccccagccatgcagaactgtgagtcaattaaacctcttttccttataaattacccggtcttgggtagtttattatagcagtgtggaaatggactaatacagaaaattgataccaggatagtggagtactgctataaagataacctggaagtgtgaaagtgactttgcaactgggtaacaggcagaagttgaaacagtttggtgagcttggaagaagacaggaaaatgtgggaaagttttaaatttcctggagacttgttaattggctttgaccaaaatgcagatagtgatatatggacgatgaagtccaggctgaagtggtcctagatggagatgaagaacttattgggaactggagtaaaggtgactcttgctatgctttagcaaagagactggtggcattttgcccctgccctagagatctgtggaactttgaacttgagatgatttagcgtacctggtggaagaaatttctaagcagcaaagcattcaagaggcgatctggctttttctaaaagcatacagtcagtcgtatgcattcacaaatagatggtttgaaattggaagttaggtttaaaagggaagcagagcatacaggtttggaaaatttgcagcctgaccatgaggttgaaaagaaaaacccattttctggggaaggattcaagtccaagccagctgcagaaatttgccaatcaccaagacaatggggaaaatatctctgaggaatttcagagatcttcagagcagcccctcctattacaggcccagaggcctaggagggaaaaatggtttaatgggccaggtgcagggtcccgctgctctgtgcagccttgggactaggtgccctgcatcccagctgctccagttccagctatagctaaaaggggccaaggtacagctcaggcagtggcttaagaggatgcaagcttccagccttggcaacttccacgtggtgctgggcctgcaggtgcagagaagacaagagttgagctttggaaacctccacttagatttcagaggatatatggaaatgcctggatatttaggcagaactctgttgcaggggaagagtcctcatggagaacttctactagggcaatgcagagggaaaatgtggggttggagcccccacatagagtccccactggggcactgcctagtggagccgtgagaagaggaccaccgtcctccagaccccagaatggtaaatccactgacagcttgcactgtgcacctggaaaagccacaggcactcaatgccagcctgtgaaagcagctgtgggggtggaaccctgcaaagccacaggggtggagctgcccaaggccatgggagcccacctcttgcatcagcatgccctgaatgtgcgacatggagtcaaagaatattactttggaactttaagatttaatgagtgccctgtcaggttttggacttgcatggggcctgtggcccctttgattttggcaatttctcccatttggaatgggaacatctgcacaatgcctgtacccccattgtgtcttggaaataactaacttgtttttgattttataggcttatgagtagaaaggacttgccttgtctcagatgagagtttggacctagacagttgagttaatgctggagtgagttacgactttggaggactgttgggaaggcatgattcattttgaaatgtgaaaagaacatgagatttgggaagggccagaggcggaataataaagtttggctctgtatccccacccaaatctcatctctaattgtaatccccaagtgtcaagggaaggacctggtgggagatgattggatcatggaggtggttcccccatgctgttctcatcatagtgagtgagttgagatctgatggttttaaaagtggcagtttcccctgcaccgtctctctctcctgccaccatgtaagacatgccttgcttccccttcaccttctgccatgattgtaagttttctgaggcgcctccccagccatgcagcactgtgagtcaattaagcctcttccctttataaattacccagtctcgcgcagttcattacagccgggtgaaaataaactaatacatccctggtaaactctaagcttatcaaaagctgacaatgtctaatggttcactatgatacccttgagcaactagcgtagtgcctgcactcattggccttcaattattgttgaattaatgaatgaattttgcaccctcattttagatggaatgggatgctctaggagaatttgttcttgatttcatggccatatgtagaaagccttgttctagaggcagatggacatacataataattaaacaagccaatgtttacatttgtgtaaaatgcctattatcttgtagttgaatcatttccaatttttcctagtataattttctaatgtgctaaatttagtatttgtaaatgaagttttgagttgccttaatattctctcttcttcttttcttaaataattcatgacctgaagtaccctaaccttttattttctctacttgttctttcctactgtaattttttaaaatctcaggcaacctgagaggcagctgaattcttttgtcatgttgtatcatgtcagcattaccacacaagtttctccagaggctgtcttgtaattacacttgattggctgattattcctgaaaggcaaaataaattttacagctgtctaggtaaactttaaaaacatcctccaaaatgtgatatgtgtgaggcctgccttgggatcatgactttcgatggaactaaaccaatggtcaatgacccatcatggtataggcaagttcaccatcatcaagaaatcagtcttttttgtcctgtgccttcaatctgatatttctctctactagagagcaagaacatctagtcccaaagcctatagagaatgttagtggttgcctagcaacatcatttccagcacaagtttgtggctttctaagcaagggaagggggtaaccttcctgtctttctcagctccctgtgagtctcttgtatttttttctactatgttgacctctggctgattgaaaacatataagatgatgtgtggaaaaactctttcagatagttaagtgtgaatacaagatgggattatcacctctcatgaaagcccattctagtccccgattctttagcgcagtgtctttgcagtcagaatatgaatcgctcgttgccaatttttggtatattctgatgcgagcagaactgcaaatgttggccccgacaagcaaattaaccacctcctaaattattttgttttttcttctggagataagtggcctgttttgtggtctgttctgttggtcccctgtctctcattccccaagcactgcaaggttgatttttaagaatatgtattggtgattgctgctatttccaagtgagtttgatttacctactttgtttattttaggtatcatgcactttctatttgttgagcctccttaactatttctccttatgtttcacgtcttcaaaacttttgtgtcatgcatctgccaagccaaaatcaggagttcaataaagtcacttgagaattataaaaacatttagttgttgggagataaatctctataggtctcaaacatttctgcatgtcttgtgaacagagctgcctttgttctgggatatcttttcaaggatgcttgcacagccaacagtcttggaagatagagatactgtctccctccagagcaaagggaagatttgcttagcctggaaagataatgatagtatgtccttctggagcaaagaaggaacttagctcatggttcattataaaatatgtaggttccctgcacttgagtccctctcctttagcacacttaatttcttaggtctctctttatatttcaccatgggaattggggcttggagaactggtgcaaatgctaatactctattgctgaagctgtcagtaataaagacttttgcctctgactcaggagtctcgtgtcttctgcctgcatctgtgaaattgtggccagacaacttattgtcttgaaagtatggtaaaatatcagacccttcatagttctagtcaagttcttagtagcttaatgctcactagttcagtaaatatatgtgttggaacatatttaaaattggtcttaagatacatttcttttaaggaacattttagaaattttagagacctgaaattctacatgactttctaccaagagaggatcaacttttgggttgaaagaactgaaaatgcaatgatgatcattgcattttactaatcaaaacttattttcaatcttcattttcaataaaattaagttaaaatttcttagctggcataacaaagatagtatggatttggcttaccttacctttctacatatgcccaaagctccggaaaactcaaatgttggaagtaactgatctatatttcactagacttttgttttctggtatttctctcagtgggtggtactgtaatttagcagccatccaaaataaaacctgaaagcccattactcttccctgttcttcattaatccacatccaatcattagtgtgttaaagatctctgttttcaaatattgcatgtgcagagactaaaaagtgcactgtataaaatagagagtatattggtagttaccagaagccgggaaaggtagggggaagggggagatgaagattgattgattcatgggtacaaatatacaattagatagaagaaataacacctggtatttgatagatcagtggggtgactacggttaacgttaatcaattgtacatttcaaattagcaagaagagagtaattcaaatgttcttagcattaaaaaatgataaatattcaaagtgatggatatctcaattaccttgatttgattatatgaatgtatcaaattatcacatgtaccctgaagatatttacatttattatgtgttaataaaacaactctagtcttttaaatatgtcccctattttccacgcttagtatcagaactctctactttttgcttgtttgaatcattgcattagctttctaactggcttctttaattcctatttgtatatttaaaatctgtcttcccaactgggctcagaccagtgtgatacatccaaaatacaaaactgatgctgtttaaagtgtgctagcagcccccctttttacacagaataaagtccatgcatttcaggatggcctccatgaactggcccatctatatctctttggcctcatgtttattttatgatctgtgggatacgtatggctagtgaccgagagcaagggctctggagtcaaagcatctgtttatattatggttttttcatctatgagctgagtgaccccaggaagatttaaatagtattccatggcttagtttcctcatatgtcaggtgggaatacaaagagcagctactcatagggttgttggaagaatttaaaaaataatttgtataaaaacacacattggtccattttgtgctgctatcatagaatactacagactgaataatttttaaacagtttaagtttatttggctcacggttctggaggctgggaaggccaagactgagggtctgcatctggtgagaaccttcttgctgcatcataacatggtagaaggcatcacatggtgagagaatgcaagaataagaaaaagtgaagggtgctgaactcaccttttataaagacaccactcccttgataatgaacccactcctgcaatgacaacattaatccattcatgaggatggaaccctcatgacctaaacacctctcattaggttctgcctcccaacactgctgcattggagattacgttttcaacacatgaactttggggaacacattcagaccatagaataacatttagtgaagtgtcaggcacataacagatattctacaatgtcagttatattaatattaaactgcttgttttcatcatgtgccatgtttttctattctttgtcttgctgtcttttgttttcctttgtgtaaaatgttcttgctctgcttcactatggaacagtggttgacagcatgggctttgggtgagattaaaacaggtttggattcagacacttccatggattaactgtgcaacattacaaagagtgctcaagaagtgattattattatcctatgtacccttcaggattcagctcaggggaaatcatctctgtgccagttatgaggctattaccttttggcatcaaatctatccttccatagttggcattttgatgctggggccaggattctgcaacctgcatttttactttgcctgcaggctccgtgttaggctccctctacttgggaaggaagacagaagcagcagggctgagggaggaagaagggacttccacctcctgtttgtgtcctgtgtgcctcctgcctgctgcctgttcctactaggctgttagttcttgttttatcttttcaaaagacagagatgagggtgaggtcaatgaagcatctgcctcaggaacaaaatttaagggaacactaatactaaggaatcaggataaattactgtatattcaaatataatattttaaaaaatcaaaattaaatgaaaaaaaacccataatgaacaaaatatcaaaattttagtagagaccagtgcccgctgagccacattagagcctggggccactggttttaataaaaacaaactcatcaataatatattcaaaatctactttgttgctaatttcatttttagttgagagaattactgtgtttgacaatttctcttgtccaagagatgatctttaataatttttacttagcttaagctgatacagagtgataacaaattagcttttggcataagtaaaatattaaacttaaaataacactgtgggctgggagtagtgggagtagtggcttatgcctgtaatcctagctctttgggaggctgaggcgggtagatcacttgagcccaggggttgaggccaggctgggcaacatagccaaaccttgtctgtacaaaaaaataccaaattagctgggtgtggtggcacatgtctgtagtcccagcgactcaggatgctgaggtgggagaattgcttgagctcaggaggcagaggtggttgtgagctgaaattgtgtcacagcactccagcccgggcaacagagcaagacttcatctcagaaaaatggaaaataaaaataacattgtgaattttaatacacctacttttcggactttcaatatttttcttttttctttttcttttttttgagatggagcctcccttcattgcccaggttggagtgcagtggcatgatctcagctttgtaacctctgcctcctgggttcgagcaattcttccaccgcagcctcctgagtagctgagactaccagtgcacgccaccacgcctggctcatttttgtatttttagtggagaccacactgtgttttaccacactggccaggctggtctcgaactcctgacctcaagcgatctgcctgcctcggcctcccaaagtgctgggattacaggtgtgagtcactgtgcccggccagtatttttcaattactttaatgttctggaaaaaaattatcttaaaaaatatacaaaattcccagccaggtgtggtggctcacgcctgtaatcccagcattttgggaggctgaggtgggcggatcacaaggtcaggagatcgagaccattatggctaacatggtgaaaccccgtctccactataaatacaaaaattagccaggcatggtggcgcgcgcctgtagtcccagctactcaggaggctgaggcagaaaaatggcgtgaaccttggaggcggaggttgcagtgagcaaagattgtgccactgcacttccagcatgggcaacagagcgagactctgtctcaaaaaaaaaaaaatatatatatatacatacacacacacacacacacacacacacacacaattatgtatctttctttgcctcagctccctgtggttcaccacagcactgccttttcacttatctagttctcaagtttatatgtaggtaactattctttgatgcccttataagttacacgaccctgagtggtcagcatcccccaacttcttagagggacaagtggcgtgcagccacccgagattgagcaataacaggtctcttctttttatgtggctcttccacctacacgtgcctacctgccaactaaacttgcacatgtactgtagtcttccttatccccaaaatgcagcttgcagatggaacgaacaactgccagtccccctcatgacaccaacacgacaaaaaagagtcatcccactaatccctttacttgtggatttaggactttctgcctccactattgcacttggaactggaatagcaggcatctcaacctctgtcacaacagtctgcagcttctctaatgactcctctgctagcattacagatatatcacaaacttaccccaaaatcttacttcagtctaatctctcccacttcaggttcctgtgccacccctaatcctgctcaaagcagccctgagaaacgtcgcccatcacccctccatactgcccccaaaatttttaccccaagttttcattactctttctcgttttatttcttcattattaacataaaaaggaacgtaaggtcctctgagctggccacaccatggtaaagccaaggcattccccgccccaccctccccccatgataatgtactttgtgatattccccctccttgtgaatgtactttgtaacattcctccctgctattttgacaatacatcctccccgcccttgtgaaggtactttgtaacgtcctccctgcccttgagaatgtacttgtaacatccatcccctgcccgcaaaaattgctcctgactccaccgcctatcccaaacctgtaagaaccaatgataatcccacccttctctgactcctttctcggactcagccctgcacccaagtgaataaacagccctgttgctcacactaagcctgctcaggtggtctcttatacggacacacgtaacaatattaagttctctctgtgatttctacctcctgaacagattctgacaacctcaaagtgcagagtggatttcttcctgttctctttccctctcttgggcacttccccacatttatactttgctaattttctgtattccaagaaatatagtcctccctgccctgcacaggcattcatttgttcctgtgcaaattcaatccattcttcaagatccatctcatatgtcatgaaatcattctttaccctgcaccaaatgaaatgtttccttatttcatgggaccatagagctgtactggcatccataccatcttactgtaccttgttttgttgctatttgtgcatatatcctattccgccccgtcctcccatctgagttgtaactttgaagatcagggactgatcttctggtctttctcatctttgaacatttcctatttggtgaggtcaggagctttggagcactagtcacagagagaactggagaaacagctgggtcatgaaacaccgggcttctgcacattggtgggaagcaacaccagtaggtgttgaagttagttttctttacattcccagtgatctcaaagcttgcttccttttttgccatttctgccttgatgctcagttttggtcctgaaaggaacgattaacttttcttctttccttagcctgctgagcacagggtggcatttaaaacagttgagagcgctctctcccctgaattagaaagagagtgatttccaggaagcagaagttcccttgggatgtttgccagtgggagtcaaacagccctgtgtgaatggctttgtgagccaagaccttctcttcacagaagtgatgtgatgctggcaggaccctttaatgaagggaccatggtaattgagatcagtggggatattctgcttacttctatagcaatcaaaacacctcctacaaaatcaaaacattaggaacagcccatcctcagcctcccactggccccaactttgttcttttagaaaagtcaaagcccactgagactggggggtaactttgtcagaagtttgtttatttatatagtttaaagacgattattttcaaagtggaagccaactgatttcagactacaaaaagaattttccaaaaacaaagctacgaggtcaagtttcagcttcatagaagggataatttgggcaaacttcgccaaccacaatagaatatgacatattaaattactgctctggaaaaggcatttgcgtttgtagacctcaggaaaccctgaatcttgagtgcagtctgagctgagagctttccctgagaagcttgcatctttataatactgactgctgacccactttaaggtctttgtccccaaaccacagagagaagaaaacaagataatgcaggtcctactagagactcttgtaccttggtgtatttatgcacccactggtgggcattgcatttccaaactagggccatggttgatttcatgctcaacctcatggcattatttactatagaatagaggatgaaaaccccaaagtatcacactagattcctggtcctttcagtatcttttcaaaagcttggtggggttttcttttagagtcagccacactaactctttttgatcattaagatgctctttgcggtaaccttctgtaggtaaagggagacatggtacattacacctagaggtaaccaaaggagaaaatatatttccctaggtccatctgtttcttgttttaccttctcatttattcattcactgagagcatactctgtgcctgcaccatgctaggagctggtatgcagcataaataggaaatacataatcactgcccccagggaacagcctcttcaaatactcaagcctagtgtaattaaggtagctccctccggatctttgaaaggctttaacagcgatagcccctcaactgagaaactttggatgtactcagtgaactaagtcaaagcctcagatatttgggcatgggaattttatgtaaaaactaaaggtgcttttaaaatatcataagcggctactattcactctgcccgccccccaccaagtggtttcaaccaggggcaattttgcgtcccagggatatttgatggagacatttttaatagtcataactggggagagggtgttattagtatctgataggtagaggccagagatactgttaaacatcctacaatgcacaggacagtaccccaaaaagaataatctggcctcaaatatcagtagtgttgagtttgagaaactctgttttccaccaatacaactgtaactttttttctacttttaatcaagaaagacaactattttgaaaaataatgctatacttgccgagtttataacttacatttcacattaacagtaagctgtaattggtatttacatgtatcttgactatacagttgggtttttttttccctgtctttcacttgttatcacattagatgttgggaaagaactagtatttttgattcccagtagttctgcctgactctagcttatgagcagaaaacctcttttgatcttcaacttcttgcctctaatggcctcagcagacattctatgcatctgcccccatcacctcttgtctctttctcagaaaggtcctgggaatttagtattctttctttagagatagaaaacccgaaagcaaaaggagaaggcttaatcaaggtcacctagcagggctttgcacgggctttctgcctctcccttggctcattattcactggtcccttcgggggaaatgtacactataaatcagaaaagactatcatctgtactctgctaaatgtgtaaaggttaaatttagtcaggcaggtgatttatacttgcttatttcctttaaaacctcatggagaattaagggagttttcagctaggatgacaaggaaggaaatctaatatttcagagttctgctgttattcttcttggagtatgaaactatcatttgtttaaaaattccatgtatccaggaaggcttgcatcagaatacatttttgtagacattaactcatcataatttgattaaacaaaattttggtgttgcatctgttaggaatatcctgagtcacatcatccactcaaggcagagaaactggtctgcaaaagcaagggtcgagaagtctcatgaggaatgtagtagaccgactgggagaaagtttctaagaaatgatatgaaagggtttggtttggttatggagatcataaagtgacagatttttataaaactagtggaactgccagcttaggagattttcacgcactaagtcaggccattcactttctttccttaggaggcaaaaagcaataattcacagttatacataggaaaaaaagcatattccctcctttccaatgtaccgccctcccaccttttctcattacttattttcctttcttgtgatttttttctttattattatgatcaacacatatcagacaatatttggtgtcaaagatgtacttagagtaaacaatatttcctaaggcctcatttacaatattcgaaacttgacctggagagcaggtagatttttatgttagtggccccactgagaaatggagaacaaggtggttcaccatggcgcagggacattttgtgttgggcatgacaaaatatttgaaattaacagttatgcccatcaccacagtaaaaggtgactttcagaatacttaaaattcaatagcttagtaatgtgtgatcttcatccacccctccacctccacctctccttgctatttctgaggttaagacttgtactcttatctgaggaacatgactcagaattagagtacatagtctatggaaagatcatcagccttgacttcctgggctcaggtgatcctcccttctcagcctccgaagtagctgagactgcaggcacataccaccgtaccatgctagttttttttttttttttttttggtagagatggtgtttctccattttgcccaggctagctcaagtgatcggcctgtgtgggcctcccaaggtgctgaggttacaagtctgagccactgctttctttatatcactttactacgtaaatgacttcttagttgtgaatacatttgatttagtggtaaataaatttcttctccctgggttgtggaaatatgagtttctaatttcatgacagaaaaactcagcaaccaactgtatttcttaattatactttcatctgaatgctgcttgtcttaatttgttatgctacaaatgacataatagtaacccaaagatttgccgtctaaacatgtgtcttttaaaagctcaataacttaatggtgcattttcggctgaagccagtgttttgttcgtacaattcatgattgctttctgttaaaaagcatgactgtatattagaatagaatttaacccaatttattatgctaaggcatgaacaatcaatggaacataaccaacgattgaatggtaagactcgaagaaaaaaagaaactgccaatcaaccaaatatttgcaaaattagttgcaataggctgaattttgtgtcccctctaaaaattcatgtgttaaaatcccgacacccaagatgatattattgggaggtggtgcctttcggggtggggccttttgggaggtcctgccctcatggatggaattagtgatctggaaaaagaggccagaaagagaaaaagagtggggaaaactctgaccccgactctcatcatataacttacatgaacatcagcattccagaagacggctcagtggttctttgaaataatctggaattaggggatgttgtctaaatttatctgcctgcatcttgttccaataaatatataaattataggttcaggacttccaaaacagggcaaaaactgaactatcagaaggcatggcaaaaacagttacagctaatattgagaaataacaaactgtatatacatatactcgtacatttttctatttagtattcatttatttatttttccaaaaggaataagacccacagttttcaatatattctcaagtgatccataaactataagaaattaaaaactgcctgtaaaaatctgcatgataaataatatttatcataatgatactaaaatgtaaacaccataaaggcaggtgttttgtctatttttgttcacttttctatccccagtacctgggacatagtagggactcagtaaatgttcattaaatgaaggaagaaatcacacaaatgcattgtaagagcatagtattctactaaatagctaaagaaaggccaaatgttattcaatacaaattaaatgttcctgctttctctcttttttaattttttttaatttttattattatactttaagttctagggtacatgtgcacaatgtgtaccctagaacacgttgtgcacatgtaccctagagcttagattatagctgttaagcagaatattcaaatgactagtgccttaggccattgagggtgctgtaacaaactaccataaactgggtggcatataacaataaaaatttacttcttacagatctggaggtctgggaccgccaagatcaaggcaccagcaaattcagtgtctggtgaggtcatgcttcctggttcacagatggctttctcaccgtgtcctcacatggcccaagagacaaaggaactctcctccccattgtctctctctggtctttattatgaggtcactaattccatccatgagggcagtcactctcaaaaggcctcacctcccaaaggcgccacctcctaatacaatcatcatggatgccaggattttaatatatgaatttttaggaggaacacaaaattcagtgtattgcaactaattttgcaaatattggctgattggcagtttctccacttttaatgccattcattggctcatgctgcctaaggagtcttgtggcttttgctcttttttgctttatctgcccatttgtcaattttctgcaagcctggtggagaccaagcaactcaatcagctcttcctcttcctattgccctcagagcacctcctagtggcaaaaagcaggcattgtaatcccagcaaggcttttgaaatttgcttctttcatccatttatttagttattgcctgcaaatgtttcaacgataatgtaatgatccctctgctgtccaaaggtttggagaatgttatgaaagaacatttttgtttttttctgtagcctctgcactgacctgtatttctgttcccaggtgacttgtaccacaatttggggcaacagaacatgcatttaatgttgggtataaacttttaataattagaaaactgagaatgccaagaaactattacatggtacatctgtataagagtatttagaataaaatgtatgtgttttcttaacacaaatcaagtaattttgggagttgataaaaggctaatagttcagaaaattaaaattatatgttaaagtcttctatgaaaaatacttaacataattgccatgtgagagagctggtaaacattaatgaaatttcaaaatcagtgcatagaagagggacatggtcgatggttgaaagtaaacagcagactggccagaaatctgattacaaagaccatgcaaaaatgaatagggcctgaagataccaaattccttctgttttaaaccaaattgattttcccctaaaagagtgttaataaaatacttcacatagtgagtttaacttttctttctcagtctctaagttatctggtataccattgtttttgatgaattgcttcttccttagtttatgttttgtgtcatttcaatctaaattggttcaaagggacaccttcagattttcttcattggcaatgactattgagcccctatgagagtacagtagtccccccttatctgagggacataccttctaagacccacagtgcacattttctatacatacatacctgtgagagttaatttgtaaattaggcggagtaagagattgacaacaataacataataaaatagaacaattgtaacaatatgctgtaataaaagttatgtgaacatggtctttttctcaatatcttactgtaatgtactcacccttcttgtgatgatgtgagatgtgagatggcaaaatgcttacgtgctgagatgaagtgatgtgaatgacgtaggcattgtgacttagcattaggctactattgaccttctgacctattgtcagagggaggatcatctgcttcaggtgattctggatcattaagccacaaggatgacgaaggttgggagtcagaaacagacagtgtcaatgactgatgggtgggttgtgtctacagtgtgaatctgctggacaaaaggatgattcctgtccagggcaggacaaagcaggacaacatgagatttcatctgagatttctcctcagaaccacgtgcaattaaaaactaatgagttgtttatttctgaaatttttcatttaatgttttcagaccatggttgaccacaggtaattgaaaccctggaaggtgaaactgcagataaggaggactacagtgttcaactatttacaaataatgacagtggccacaaagattaccttgaaaagagaccgtgagacagtttcacacagactgtgcctggatttccatgagtctctgccaactgctttttaaggtattataccatataataatgttttttaaatcttttagttggaagtgattttttttttcttgagacagagtcgcgtgctgtcacccaggctagagtgcagtggcaagataccagcttactataacctccgcctcctgggttcaagcgattctcctgcctcagcctcctgagtagctgggattacaggcacctgccatgatgcctggctaatttttgtattttcagtagagatggggttttgccatgttggccaggctggtcttgaattcctgacctcatgtgattcacctgccttggcctcccaaagtgctgggattacaggcatgagccactgtggctggcattttgaagtaattttagactttaaaaaaggtgcaaaaatagaatagagtactccgtatactcttcatccagcttcccctgtataactatagcacaacattttacataactatagcacagtcatcaaaaccaggaatacagtactgtttcaattttaaaataatgtgccttagctgatgatgttcttgctatacttttctttctcatctctttaagtctttgttgcttctcttcttcagaaagagtaaaattgaattctagagaggtccactcataagaggcagacctgggcaatgaactcgtttttttgccctgtgctcttgaaactggattctcctttctcaacagcgttaagcttcagttctctatgttgccaaaagccaaagttttagcctggggctcagaatattggcttatttttcctgtataaagaactgtcagactcttcttgacaggggttcatattaataaccctaatctccatctcacggtagaacatgctgtctacttaataagaacttttgccccttttctgttaatgccatccctttacacaaaaaatgaaatacatatatcatgaagctaattatgttcagcttaaatatttatttcaggatggttctaaatcctatctctggtctggtttagtgattttcataatgcttagacatgatgaccatttcaaactgaaaccaagaaagaatatgaatatttctttataaaaataaaaacacttttctttaattaaaataaaaccaagaagtttcatgtgaaaggtcacatttctagctcgtgctgtgttgtcagcatactcctccagccttcttctctctctctctgtgtgtgtgtgtgtgtgtgtgtgtgtgtgtgtgtgtgtgtgtgtgtgtgttgttttgggaatgtgtatagcatcttatcaggagctgttggtttgaggtcaatgccatctccactgtcatcccgatcaacagtaaatacaagagtagcttcatgttctccacaacaatagaaaaatccctcctgggatgttctttgggaagtacaagaaaaagccattaaaagtttcatgttgacctttcttgctttacagaggtttgttggcaggaagtgtcttggttttcttgatggcagagataaagaaaaaaagaaaaaaaacaaacgtgaaaaattccaaggatcaatttgctattcagtttggaaaatagttatttacaagaagcactgtggcatctacaagatcttgctacctcacccaactactccctccctaatccaaaaaaatgagagaaacccattgcagtctgtggttggggttgattaaacatcccttggggccctaatgccctcgaaatgatgtgaaatcactgggttgtgtatcaaaagggcagggtgagctcctggctcatctgactttaatctcaaatggctccacactggtagttgagaacagacaattacttcattaacttttggaaagtctgaggcatttgtgttgctttctggactgtgctctgctacagggagagaaaagacgaggtccaacgaggccattcatgcctgccaagttttcctttctttccaatccaggaaacatacattggtagtgggtaagatccaatattttataatgctaagacagagagactcacccactgaacagcccagagtgaatattccccaagtcttggctggcatgtaagcccagaatcttcacccttactctcaaaccttttgccacctctatccaagaattatttttaataatgtcatgttctcttctttcccttaaataaatccactcatatatgaaaattaaaaagatttatgtgtagggaatcatacacatttgtcagatttatctgtaactttaggaatttttttttttttttgagacggagttttgctcttgttgcccaggctggagtgcaatggtgcgatctcggctcactgcaacctccgcctcccgggttcaagcgattctcctgcctcagcctcccaagtagctgggattacaggcatgagccaccacgcctggctaatttattttattttatttatttaattaattatttatttttagtagagacagagtttctccatgttggtcaggctggtctcaaactcccgacctcaagtgatccgcctgccttgggctcccaaagtgctgggattacaggcttgagccaccgtgcccggccaactttaggaaattttagagaagatttagaggatggtttagagaaaaatattatgcaggagacattgaattgttaggaaaagccactgtagaactgggggctgttattgccaaaaatattagtttggtacaaaagtaatggcgttttttgccattactttgaatggtaaaaaccgccattacttttgcaccaacctaacagttaaaccagcaaaagcgacacacattttacaaaagagtcatgtaattctgtatctgaaactgccagcagcagggtgttttttcatccattactgccatctgaatattttcatctttttgcctctgggcattaaaatgcaactaatccaccacccacaaaacccattagcataaacagtaaaaaaatgagtggtcagactacacagtgatagcactgaaattacttgagtaaaatgcagatgtaatgaggatgtcagtttcagagcagtttgcatcataatagactgaactgtcttggacttcaattctgggttcttttctagatgactattgtcctttttttaaaaaaaagaaaacatctgtgtcctgttactttttttttttttttttttgctttcccccaaagttttctgatgttagaatttagaattttgtctactgtttaaaaaggaaaaagaaaaattttccactagctctcctttgagagaatgagagaattctaattgcttctccactataaaagcacaaacttccatgaaaatggtcatcggagagcagaggtgacaggatgtatactgctgaacttttttgcttccactcttctagataactgctgagaaaggccccctttagctttgatatccaaaaggcaaaacaaagaaggtaagcacctttcagcagggcaaggacaactaatgtgttcttctgcccactgcagctgagacccatggtgcacctgcattcttttaactgagacaacaaaattctccctttaatccccttttggaaggaggagggagagagtactaccatgatgtatgtattttcctttccttacctctttgttcctgagtttttgcttttcagacaataaaatcattagaattagaagaattattattattattcctagtaatgtagcaactgtcagttccaaacaagcctccttggctctgacaatcccatgctctgctatacaacacagtgaaaattgggagcataaactcattctgttgcctcaacaaaattatattatggggtgaagtctattggggatggggcagggtacttcatagcatgaagagaatgcagaataatgttcttagtcccctgtctgtgtggcctattgaaagggaagagattataaaccctactgtggagttaataaaagtagaatctgtaggccagggactgcacgcaagttgacctctgttggggaaagctctgggggtacagtgctgagaacctctcctgggagtcagatgttttttgaattatctttctgtttgaagaagaatctgccttccattcattcattcagggctcttttgagtagcccatgtttcaaatgagccaggagggaccagacatgtgattataaaaatacattgaaattgccaaggtggagtctacagcagtggtccccaaccattttggcacacgagggaccggttttgtggaagaccatttttccacagaccaggagtggagaggggaggatggtttcgggaagattcgagcacattacatttattggacacattatttctattattattatattgtaatatataatgaaataattatacaactcaccaaaatgtagaatcagtgggagccctgagcttgttttcctgcaactagatggtcccatctgggggtgatgggagacagtgagagatcagaaggcattagagtcttataaagagagaacgaattagatccctcccatacgcagttcacaatagggtttgtgctcctatgaaaatctaatgctgcggctgatctgacaggaggccacgctcaggcggtaatgtgagtgatggggagcgactgtaactacagatgaagcttcacctgctggcctgctgctcgcttccctctgtgtggccctggttccagagattcctggtctacaggaactcgtctctcttaggtcttttttcttgaagagggatttgctttcccaaacttttttttttttgagacagagtctccttgcccaggctggagtacagaggtgcaaccttggctcactgcaaccttgacttgccaggttcaagtgatcctcccacctcagcctcctgagtagctgggactacaggtgggcaccaccatgctgggctaattttttgtatttttagtagagacagggtttcaccatgttgcccaggctggtcttgaactcctgggttcaagtgatctgcccacctcagcctcccaaagtactgaggttacaggcatgagccaccgtgcccgacctttctggaattttttttttttttttttttttttgagatggagtctcactcagtcgcccacgctggagtgtagtggtgcgttcttggctcgctgcaagctccgcctcctgggttcacaccattctcctgcctcagcctcccgagtagctggtgccgccatcacgcccggctaatttttgttttttttggtatttttagtagagacggggtttcaccatgttagccaggatggtctcgatctcctgacctcgtgatccacccgcctcagtctcccaaagagctgggattacaggtgtgaaccaccgcgtctggccctttctggaattcttgaatctttaataagattctaggctatatgtgcctttggttgaattctcctgagttgtttctatttctctgagtttgccatttttcttcctctattaagtatctgtattccagggttttgtgtaattcaccaaagcttttataataatttctaagaacaattttgatcaaagacctaagaagacaaataaaattcttcagtaataggtataattttcatcaaatgattgctttcctttttttattgttagggctctattgctaaacgtgaaaggggagctgtctcatagataaaaccctctggtgttctgaaggatgaatgggaacagtggaggcaatttatcagaagcctgtttttctctgccaggtcctccagcccatttcccccaggtccatggagaggaaactctcataggaaactgacataaacatagacatttcactttggtccagccaatctaccattaagaatattcaaatccatttatgaatggatcttgagaaagaaaaaatatattgctatgttggttattttgtaaacgcccaatgggttcactttgcttgcctaaacagagccaatttatcaagacaggggaattacaaaggagaaagaatagttcacgcagtgccagctttgtgggagacaagagttttattgttactcacatcagtctccctgagcattcagggactggtgtttcgaaggataatttggtgtgtagggactcgaagtggggagtgctgattggttgggttaaagatgaaatcataggaggtcaaagtgagttcttgctgtcttctgttcctgggtgggattgcagaattggttgagccagattaccggtctgggtggtgtcagctggtgcgtcgagtgcagggtctgcaaaatatctcaagcactgatcttaggttttacagtagtgatgttagtcccaggagcaatttggggaggttcagactcttggagctggaggtcgcatggcccctaaactgtagtttctaatcttgtagttaatatgttagtcttgggaaagggttattatcaattttgtttcagagttaaactataaactaaatttattcccaaggttagttcagcctatgccaaggaatgaacaagaacagcttgaaggttagaagcaagatggagtcagttaggtttgatctctttcactgtcatagtttcctcagttataatttttgcaaaagcagtttcactttctagtgtctaatattttagtaagtccttctccttcctcccattttcctacctttttgatcctttctctgtgctacttgccaaagtgtgccaatttcaattcactcatttattcaacaactactccttgagcatcatcatgcacaaggcactagactaaacactaaggattcatccgtgaagaagacagacaaaaaaaaatcttgtctttgcgaagtttacgttcttgtgagaggaaggcaataagcaaataaaagagtaaaacatatgagtcagatggtgcccaggagaaaagtgatgaagagaaggatatatgaaatgcttcttcgtatgctgttagggcaggggagagagttaagttttggcaaccatggtcaggaaaagcatcatcaaaatggtgacatttgatcaaagacctaagaagacaagggaataaggtgaacagataaccagtgcgttgcgatttttgggtagggctcagtggtgaatgctcctgtctgctccacacggcatccacagaggcgtggtggtggcaggtgcctgtagtcccagctactcgggaggctgaggcaggaaaatggcgtgaacccgggaggcggagcttgcagtgagccgagatcgcgccactgcactccagcctgggcgacagagcgagactccttctcaaaaaaaaaaaaaaaaaaaaaaaaaaaagatggtcctaatttcaacaccttgtatgttaagtctctggataagcattaccacctttaacagtggtttataagtaaaaattgtattttgccacaaatctgcaatttgggtagggctcagtgaggaatgctcctgtctccacacagcactcaacagaggcagctgagccgaaggatgggggtatgtttccaagatggcgccctcatgtggctggtgagttggtgttggctgtcagcttgggagtttggctgggggcctcagttcctctccatgtgcagtgtgcacctgtatgtgcaggaatggaggaatggagttatcatttactgagaagtgaaaggctaaaggaggagcaagacatctggagtcagatgttggacacattaagcgtgagatgtctgctaaatattcagcaggcaactgggaacctggagttcagaatggaaattataaaaagaaattgccctaccaagggaattaacatccttgtctttcattactagttaattatgctgagctgaccaagacaggaaatggccattacccatacttatccctaatagaatgtgtatatttatccaaatgtggtagttttaaaacaagttctttgacattcttcccatcaagagatggaatctatgtcccctttccttgacctaggcaggcatttgtggttgccttggaaccaactgggtatgacagaagtaatgttatggaacttttgagggtgaggcataaaaggcaatacagtttctgcctctctctttgggatgttcatccttgaaacccagccaccatgctctgagaaagccagggccacatggaggtgcacattgcttgtggagaggaactgaggaccccagccgaactcccaagctgacagccaacaccaactcaccagccacatgagggcgccatcttggaaacacattcctcatccttcagttcagctgcctctgtgagtgctgtgtggagacaggagcgttcctcactgagccctactcaaattgcagatctgtggcaaaatacaatttgtactgtataaaccgctgttaaaggtggtaatgcttatccagagacctaacatacaaggtgttgaaattaggaccatcttttttttgtttttgagagggagtcttgctctgtcgcctaggctggagtacagtggcgcgatctcggctcactgcaagctccgcctcccgggttcacgccattttcctgtctcagcttcccgagtagctgggactacaggcgcccgccaccacgccaggctattttttaaattatttttagtagagacggggtttcaccgtgttagccaggatggtctcgatcttctgacctcgtgatctgcccgcctcggcctcccaaagtgctgagattgcaggcgtgagccaccgcgcccggccaggatcatcttctaaaaaatttttttttagccattgtattgctagtgcctggcattgtctgagtatatgcagtaggcacgcaatagctgttttaaatgaatgaaccaagatgaaacatctgtgaccatcttacaaatggaaggagggaaggttgaaaacactgagaaagtctcctagtttggaggaatagagttcagctcaggaagaacgtagttcagggtaatttttttttttttttttttttaagacagagtcttgctctgttgcccaggctggagtgcagtggcatgatctcggttcactgcaacctccgcctcctggattcaagcgattctcatgcctcaggctccagagtagctggacttacaggcacatgccaccaagcccgagtattttttgtgtttttagtagacacagggtttccccatgttggccaggctgatcttgaactaacctcaagtgatccactcgccttggcctcctaaagtgctggggttacaggcatgagccaccgcacccggccagggtagttaaaaattgtatgctctgaatgtgtaaaacaggttgtccaagaaatcttatggacaataaaagtcatttactttggaaattattctaaaacattttgaaatagagcaatgttagaaatgagatgctgcctctgctagttgcctcagagctggttagttagcagaggatagattttctcggtttaatagccataaaggatcttcatattctgatttgatctgcaaatgtattcaacaaagtgactgcatgatgaaagcaagaaaattatataaataatttccactccaatttttcgtatatgcccaaagtcataccagtgtagagccttaacatgtttgtatgtaggggacagggaacagaagcgtattaatagacacagggccattcaaggatcctctacaagacagtcattcctgattgactagcctaaatcagaaaatggtgtgtatggttaggccaaaattagtctcttctttttttttttttttttgagacaggtctggctctgtcacctaggctggagtgcagtggcacaatttcgtctcactgcagcctcgacctcccgggttcaagtgattctcctgcctcagcctaccgagtagctaggaatcacaggtgcgtaccaccacgtccggctaaatttttgtatttttagtagagacagggtttcaccattttgcccaggttggtctcgaactcttgacctcaagagattcacccgcctcggcctctcacagtgctgggattacaggtgtgagccactgtaccttgcctacatcctgtattttctaaaacatgcattgcatttataatcatagtgcatattttaaagcaaagacaggaatctgggtctcttaactcaggaaaagatttaggtttaagttattgctttgcatatatgaattataataaatacttttcatgtggctgatgttagacagtgtagagaagagaagcaagagcagaaactcagggtccaccagcatccaaagcagtgatttttatgatccttcacagcttaatcatgggtgtgtgtgtgtgcttgttgaaaatgcagagtcctgggtctccagagatgatctcagtaggcccagaatgggatctggaaaactgcaatgtttggccaggctcataggtgattctgatgtaggtgaattctttgagaaacagagatgtgaaggacagtgcttctcttacctacaggactcaggtaggagaaaaatgagacagtcatggctgggaagccaagggacttttgggaaaatatatgtaaaatgtactaaaagcacattatgatgatataacaagatgttctccaccacagctgtgtattagaatcatctggggcactttaaaaatataccagtgtgcagatttcctcataatggtggtaaatgtccctctttcagcatgactaagagataagagaagctgcaattttccaattatctgtgcatagaagaaaaaaaaatccaacagagtgcccactgtgggcctgcagcaagcagccaccacaaacctatgggtgcagaaatcaggggagaggagtctcaagagattggggaaaagggtggagggaagcagagaacttagagaaaaaacagacaaagccactcccaaaagataaagtgaaacaatatttacaaagagaatgaacaaggccgggcatggtggctcacgcctgtaattccagcactttgggaggccgaggtgggtggatcatctgaggtcaggagttcgagacctcctggccaacatggtgaaacctcgtctctactaaagctacaaacattagccgggtatggtggcgtgcgtctgtaatcccagctactcaggaggctgaggcaggagaattgcttgaacccaggaggtagaggtttcagtgagccaagattgcaccattgcactccagcctcggcaacaagagtgaaactcggtctcaaaaaaaaaaaaaaaaaaaaaaaaccaaaaaaaacgagcaatgatgggcacttggcagttcagagcccaggctccggagtggggcctgacagtgtgcagaccagacatggagaatccatgcttgttggggagaatcagacacagggagaggagtggtgcttctgggagacaggcacagcagaagaggagacagaacaaaattaagcatcctgcagaaaataggagacacaacaactcttctatctttcctgtcaacatcagccacagaagcaactgcacagaacattgttgaactgagggaagaagctgctcctaactaggtctcctgcccacagaatgaacaggaagaggaaggagtggaccaacttctatagagaacaactgccaaagtcagaagttgcaaatcaaagtttttctgctggtgatgtctcctcgatataaccatgaacttgatgaaaattctaagacaacactcaatatttatgaaatattctccaacctgcatctgggaacatggaaaatatcaatatgttgaatcggaaatataaaaactaggtagagaaatcaacaaaaaataggagaaaatgaagccagagctgattaaattcaggaaaaaaaatagaagaaaatcacaaaactttatcagtaataaagaacagattacaaggtgccccgaagagaatgggttcaaataaaaacttaataaagggtattgaataaaagaaggatagccaagagaatgaaaaggagataaaataaaaaggaccagagaagatagttgaaatggaagccagacaaaggaggttgcatatttgtattattggtgttcctgaagaaaagaaaaacaatataacagaatatttaaaactctaatccaagaaaaagttccagaaataaaagaactgagtcaactctacactgaaagggcccagtgtggtatataggaaaactgaccacaaataattctgagatagctcggaaaattattagacttataaaaaaaaaatcctcaaggcttccaggcccaaaaaatatttacaaagagaattaaagattggcctcagatttctcaaaaataacatgcaaaccaagaaaacactggaacaccattttcaagaaacctaaggaaaaacaagctgctcttcaagtttcaaggtcacagaaaatcagtttcaaactcaccagaattccaggaatacagtacacgtgctcttgctgagcaatttactggagggtgagtttcacccaaccagaatatttctgggaacaaaaggaccaacagagatcatttcacatatttgactgtagagctgagaataatgtaagagttcgttcatgggttaatgaaaaacatggatatgtaaacattatatactgataaagtagaacaaatacaactaaaaaggtgggagaagggagagaaaaggggaaaagtagagtaacaccattgactgacatataggtaataggtgggaatcagtatcatctagaaaagacagatagtaacaggttaagaaagaaaaaaggggccgggcgcagtggctcatgcctgtaatcccagcactttgggaggccacggcaggtggatcatgaggtcgggagatcgagaccatcctggctaacatggtgaaaccccgtctctactaaaaatacaaaaaaattagctgggcgtggtggtgggtgcctgtagtcccagttacttgggaggctgaggcacgagaatggtgtgaacccgggaggcagagcttacagtgagccgagattgcgccactgcactccagcctgggcgacagagccagacttccgtcttaaaaaaaaaaaaaaaaaaaaaaaaaagggagtaagagcactacagaagattagtataaaagcaacccattagaataaagatacaagacccagcgcggtggctcacacctgtaattccagcactttgggaggctgaggcaggtggatcacctgaggtcaggagtttgagaccagcctggccaacatggtgaaaccccgtctctactaaaaataaaaaagtagttgggtgtggtggcacgtgcctgtagtcccagctactcgggagaatcgcttgaatccgggaggtggaggttgcagtgagccgagatcacaccagtgcactgcagcctgggcgacagagtgagaccccgtctctaaataaataaataaataaataaataaataaataaataaaagacacaaaattcataagccaaaagaaaacgcaagaggatagacacagtaaatataatacattcagcaattacaatctaaaatatgacagaattgacatcaaacatggtagttatatcaaaactagatcggcttaatttgcctattaaaaaagattattttcggattggctcgtatagcaaaaactcaactgtgtgctgcacacaagatacacaccgaaaatgcagcaattgaaatagctaaaaataaaggaatgaacgaaaatttaccagacaaatggaaacagtaagacagcaggcattgcaatcccgatacagaagtagagacttcaagccccaaacagaacacaaaagaaatatagagctataaaatggcccttgggcatatgaaagaatagcccaattattcataagataaatacaacttaaaattgtactgagattgtactcttcctgacccatcatattagccacagcaaagtctccccaaatctcattaatcttttttgcgcagcagctactcctataattctatttggcagcacttcagttttgtataaattacctattgattaatccccagaccattgggagaatactatcaatatacctcaatttaagaatcaagattataaggcattatcttttcataattatatatgtatgtatatatacatttggctagacatttttttcattagctttaaaattgtcagaggcgtctgaaccagagcaactccattttgaataggggctgggtaaaataaggctgggacctactgggctgcattcccagagggttaagtcattctaagtcacaggatgagattgtaggtctgcataagatacaggtcataaagaccttgctcataaaacaagttgcagtaaagaagccggtcaaaacccaccaaaaccaagatagcaatgagagtgacctctggttgtcctcactgctacactcccactagagccatgacggtttacaaatgccatggcaacatcaggaagttaccctatatggtctaccaaggggaggcatgaataattcagcccttgtttagtaaataattaagaaataacaataaaatgggcaaccagcagcccttaggttcactctgcctatggagcaaccactctttattttcctactttctttaaaacttcatttccttttcctctatggacccgccttgaattctttcttgcatgagatccaagaaccctgtcttggggtctggattgggacccctttctggtaacaaaatgatcaaagttaaagctgtagttactgtaactgagttggccttggaatgccatcccatatagtgccatgtttgagagctggttttcatttcattggtggcattagaaatgtactattatattagggttaattcgccctgctaccccaactagctagctacctccccttgggccaggcaaaatggaacagtagcttgtacatatgaattgttaacatgtacatatcttcatacagcagtcatgtctaactgtccctaacagggcaagggagatgaccggtcattttttctcatgaaaacaagatacactcaggtgagttttgagtttgttcaccatgcagaatgtgacgagataagtttaattttctagcttagtgtttttagcttaaaatgttgcaatctaaagctaaaatgttcacctgaggccaaggacaacacagcaaaaacaacagggccaatgtgtcctcagacctttggaatcgcagtcagatatcactatgaactgagtgtttgtgtttcccccaaatccctatgttgaaaccctaatccccaataatgggatgtggaggtgggacctttgggaggcagttaggattagattaggtcatgagggcagagcctcacgatgggactagtgttgaagggaaatgaagagaccatcttattcttcaccatgtgaggatgtgaccaagtatcctcatttttctaagaaaaagagaatgagttactatttttttctcttcttttctccattttccagtttcccatgtcctacttagccctttagaaatgcaattataattgtttacctctccttcacgagacactccctacagggcaaggctgtctaacatgtgtttcaaagctccagtgaaactctccctcaccaggagactgctcaggagacaacagtcaatttacaacccaaattatgcccgctacaaaactctcccccacctggagactttcggacacctttgtaatcgaattctgtccacaaagacgtcaactcaaccgcctggtagataaggcaccacaacgagtacagggacctccacctgctcactgccttccctgcatgtcattcgtgccaggccctccttttatttatttatttatttatttatttatttattgagacggagtctcgtctgtctcccaggctggagtgcagtgagccgagattgtgccactgcactccagcctgggtgacagagcgagactctcaaaaaacataaataaaataaataaatatcctacactggtcaggacaactcccttcaacaaggaattattccctgcaaaatgttagtagcgttcaggatgagaaaccatgctttacagataatcagctgtcttaatttttatttccctggaacttttccctttgtctctcatttgggacaaacttgagggccaaaatatggcagcaaaatgttttagatcaagtaaagactgtaaattaggtctatgaaatattttcccagcactgggagacacatgttggccccaacttcctactcagacttgcaattaagacacaacaggtgtgggtacccaacatgcgaagacttctcactggtctgtacgtcagtaaatggtcaagattgttactatggaatcattcacaccagcacaatggtgctcctccaagaatgtatttatttacatgaaaacaccattttatacaaattgaagacacatcttaaaagaagggtttgtccaggcatgccttcctcatccccttatattgccacttccattttcatcttcttttgtatcataaatgaaacttcagactggttaaagaaaattgaatctgcctcttctccccacccaaaattacttcgattatttaatgtctgtagtcatccttcaaagaaaagtcttgcccggggttattttatttaatttatttatgtaatacagtgtagaaagcgatcatgtcataagcaatgattctgtacaatcatcctgcagaaaattgttttggagaattcttggtaattgaagaccagcagagcacccctccccacccgccccgtaaaagtgcttacaatgaacagggattcttttctttatcaaagacccaaagatacgtggacaaaaaaagaaaagcttgaagtctcaatgcctaatgtgtgcacataaaacaggcacgaagaaacaaacgtgtgtatcctcttaattcctatatcacaaatatagcagaagcagcaatctgtacagtaaaatgcagtcatggaaaaaaaatctctctaaagcatctgaaatacttaaaaatgtttaactttaaaatgcatagtgatcaggaaaggaatacttaggcaagagaagcagctgaactcccacgttcacatgaagcatcccccatcgattcttaaagcatatgtaaagtaggacttaattgggtcacaaaccacaagaataatatacaactggctaaggggctatgtgataaataatcaggagagaatctattcatgcactagtttgatacagctaaattctttacagtacacaaaacccattaataatgtagtatagagaccaaaatgtaaagagagatagaatacattactgatgtgtggattaattcaagttcaggcatctacttgtgttacagcacagctgtcaaaaggcgataatgagtaaatcataaaacgggtttgtttcttcccacattattctataaatggacaccgatgggtagtgaagcaatggttttgctgtccaacttcagaggctgctgtggcgggggtctagttctgcatctgctcaaagaacttgtaggttggattttcgtagccgttctgctgcatcttggacaggtggcgctcctctggggtgacagcggcgtcaacctgaaaaacaagaggagagctgagtaaaaaataaaaatcaatcttttaagggtgaacatggagaagcagtaaaaagataaggagtacagtactcttcttttgccaagattgcagaacacccataattttctcccccactttgacatcttggagcagaacgcctttgcccaccagttacacagatgctgtgctccatctagccaccaggtggcggtggaaaccttgacgcgcttgcaacgtgtccagtggttgtttctggttccccaactccacagtaagtggataaacccagtgcaatggtattttttcctcccctgttgggtccataaaggacaaacagagtcaacggaagcctgttttacgtggaagtgttttggtaaaatagataaaaccacaagagtatcatggagggagattcagcaaagtatactgtatcttgggtgacactcaaatctgtgtagaaaaatactcgatttcctggactgctgaatttagtctagcccatttctatcaaattttatgtttgttaaaatgttaaggagaggtttgagaatcaattaaaacaataacatataccaaagggggctattatttggcacaagaaaaaaggaagagcaaggacgacgccattctagatgatgtaattttttaaaaactgagaattaagatactatagaagtatgttcagctcaaagtttaaaatcagaccctctctgttaatatgttgctttacctctaaggtcaggccagtaactgaagacgtttttctccccctgtcactgttagagctgtgtgtggcatttactgtctgcaggttgggcagggtacttacccctacaacgtgggcagtggctgttcttgttttactatatttgttatacctctccccgttcgcagaagagaggaggtccttaactctgctgaatgagtatgttaaaattcctcttttgtaaaaccatggtaagatgaagagaataaatagaaagtcatcagaatgaagaggcatgttttccagagaaaagtttggatgtaccatagagaagatattccttcaaagggatatttcctagaatgggctgctcattcatctctgggagaatactgcaggcccattcccccttgttgagtgttgccaagtgacattcctcccttatgcagcttttccccctacacaccccatctggcatggatctgagcctacacagcaatgcccctgaagccaaggaagaaaaagtaccagcgaggatgtagtgtcagcagtaagacatgaggtctcgagatggagctagatatgtcatgactagaccacactggctgataacaattcagactaaaagatctgtcaatatggccgggtgcagtggctcactcctgtaatcccagcactttgggagcctgaggtgggtgcgtcacttgaggtcaggagtttgagaccagcctggccaacatggtgaaaccttgtctctactaaaaatacaaaaattagccaggcgtggtggtgcacgcctgtaatcccagctgctccacaggcggaggcaggagaatggcttgaacttggggggtggagtttgcagtgagccaagattgtgccactgcactccagcctgggagacagagtgagactccatctccaagaaaaaaaaggccaggtgaggtggctcaaaatcccagcccttttgggaggccaaggcgggtggatcacgaggtcgggagtttgagacacgcctggccaacatagtgaaaccccatctttaacaaaaatacaaaaaaatttagccaggcacagtagcacgtgcctgtagtcccagctactccagaggctgaggcagaagaactgcttgaacccaggaggctgaggctgcagtgagccaagatcgtgccactgcactccggcctgggcaacagagggagactctgtctcaaaaaaagtaaataaataaaaataaatctgtcagtataatcaggtcccctgtggtcccttcggatagccccacttcatgaagtgattgactcttttcagtctgggagtgaggtggaatgactaccagtggctaatcccaaggcagctggaataggtagatatacagctccctcatcccttgggacagaatgttccatccattatgtgcccattttttttgagttggagtcttgctcttgttgcccaggcaatctcggctcactgcaacctctgcctcccaggttcaagtgattctcctgcctcagcctcccgagtagctgggattacaggcacccgccactacgcctggctaatttttgtatttttagtagagatggggtttcaccatgttggccatgctggtctcaaactgacctcaggtgatccgcctacctcggcctcctaaagtagcactaggactacaggcatgagccgccatggccatgtgccccgattcttacgtttccatttatggaagagactgtgcgccactgtgaatccctcccatctaccaccctgtggctcagagctgcctgagttcccctgcatccaaaccctcagcttactccaatgacagacctaggcatctccccttagcacactcccaccaacaagctctgaccaaggccagtactcagaggactctgctcaaatggatgctcagcttcactgtccttctgggagcaaatcacagatattttccttatcctctcctctttcctttgctgtgcactgttgtcaacaaatgaggtcacctggctttaactggtaactgtgtaattagcctccaacttgtaagttaaaaaccatggttaaagattagcaccaataatgagagatttcattcactctgtaaatctgtgtgccaggagacagcctatctgcagcagtacgccatttgaacttgggcatcatttttgctccccatcacctcgaaactgagaactcaaagaatgcccaggttaaaaaaaattatcttgcttaggagatcaagcacaaagctgctatgtttctgattgtagaaaaaagccacaatgctgcttgattgttggaatattatacttttatttcttccaggaggcacatctaccatcacactggctgtcaacaatcatttgcatgcatcaagggcaggggaacacctggcaatttgataggtttatctcctcttcaaactccaaagcctaacgcttaagagtgccctgctagagatgcgaggctccaaggctggtgcacaatccagacctctaactctcctgtcttttcttggcttctgttttgctacttgataatcctattaccttttgccactgagaggacagctacattttgccattcctgccatggggcagcttggccctcagaccttagagggcttaggagctacagaagaagggattatcttgacaaaagggcatccaaggagtatggattggatctttaatctccagccccttgaaagctagatgcgaaaatctgagtactcatgtctatggataaaggaggagcaccaagtaagggtagccttcctctccagcaggctcaccaatctcttcctcatggctaagctacagcagtggcatgggccaccatgtgaaggccagccctaccacgaccctgtgcagacagggcctctgcacagacacaatattatttcccttaaagcagagccagggagggtttgagcccatggtgcttgttctggaaggaatgataagacaatgaagtcagaatttccattttccaactgggcaggaacatctgtcacttgctgggatgaagacacacatacatacaaccactgaatattcattctcttcccagactgcctggattacacagcagcaggaaatgatctgaggtcttcatgtgactctcggtacgctgcaccttcctgagacctggacccctgcactgcatggtggcatggcttcaactggctgctgcctatgacacacgctgaaaagagctgagcccaaatagcctgaccagccttgttctaaaatagctttgaggagaacgtttgacactctttggctaacctccataccccctgacccttttctccctgaacttgattcattggaaccatttagtccttcactgtatccagagtaatttagagctcagctatccgcctgcagggacaagattctatttgggtgaccttagtttctaggtctcctcctattgcccctagagtatttacatgcgggtgtgtgagcttggaggagaggcaggaaacaccacgtttacattttattatgtacagtaaccagcaggatgtggattaatagatgtccttttatacaagggactgagtcaggccaaacgacagaatcctgtcattgagatggaccagacgagtaaaggagggtaagggaactaaggcgaacaatacaacaatagtgtgacacatcaaaggagccacaagtctgcggaaaaaaaaaataaaagcaaagaaaataggaagttttcaagctagtgacttatccctcgtaacctcccagtaactgcctgctacctagttgtatagatgcttgttttcctaattttgatgccatctctctatagttatatataactagaaggcagttgactatgtttatggccaacatcaagcaattcttcaggcaggttcaggaactcctttgctatcccttcataattttttttttttttaagacagtcttgctctgtcacccaggctggagtgcagtggcgtgattttggctcactgcagcctccatctcctgggttcaagcgattctcctgcctcagcctcctgagtagctgcgactacaggcgcatgccaccacgcctggctaattttttgtatttttattagagacagggtctcaccatgttggccaggctggactcgaactcctagcctcaagtgatccacctgccttggcctccccaaatgctgggattacaggtgtgagccaccacgcctggcctgtgatcatttttgatgctttcctttgatcttccaatttctcttcctgctgctcactgtaagccactcctaggttctgcaccccccctcacttttccttatcgtggctttccattcaacctgaccactctctccaactactctacaatgccaacgtcagtgcgtctgtatcctggtgggtcagcttctggccgggaagaaaggacctctaaggacatctttttatacagtcaccagtgtgacagcatattacttagaaaaagtcatatgccatacctccataaaagccaaataaaaggaactctcttcttatttagatcattaatgagataaccaggaggtgggggcggggagacttctggtgttcaagtgatcagatctgtgagaggaaaactttttcacatcctataataaagagaagctgtgcccccaacttctccttattaaaggtgacatgtctggggagagtagcagaaagagctacaatacgtatttttaaatatccagtgtctatgtatgtgaatgtagaaaagtaccgcttgctactaaacagatcctgggattagtgggctttgcaggaacgtcctaaaacaggagcaaggtggttaattcagctagtgctgagatttccagccaccagagggctattctgacatggagggcacatttggggagtggtaataataaagggctattgcttcactgcttgaagcaccaataaggcacagttacctccttgggaaagcgtggccaatggctcacagagtgactctctggccttatggctaagtaaattcagtaagtcaatatttcctgcttatttgaaaaaaaaaaaaaaaaaaaaaaacaacaactagcaagtgctcatttccaaatgctaacaactctaccaataaaaatacagttatgggccacataatgacattttagtccacgacagaccaaacatatgatggtggccccataataccgtattttttactgtaccttttctagtttgtttagatacgcaaatccctgccagtgtgttacaactgtctatagtattcagtgcagcaatatgctgcacaggtgtggagcctaggagcaatagttgtaggtgtgtagcccaggtgtgtagcaggctataccatctagatttatgtacatgtactttatgatgtttgcacagcgatcaaaccgccccatgccacatttctcagaacgttctctccagtgtgaagtggtatgtgactgttctaggcttgtttcatttatacatttgttctcaggagtttttttcctagggttcctatctctgtgatcttctgcgggcatttttcactctaaaaacaaaaaatctcctggaaaccaaagctttcatcatgacttcttcaggcacgatggtatgtaagtacaatggtattctgtcctgagtgactgaggtgagtccaactggaaatattgatgtactcatttttgttcttactgaagtagggttactgattaatgaaggttagccagagccggaaataaaggtatttccatgtacttgagggtgagagtgcctgttaaggtaggaagaggatgttgcagaagcatcacttctgtgggtgcagacgctggaatgctaagaaaaatggtgctctgaaagcccaccgtgctctctcacctgggaacatgcctaggctgggttgcaactccctgtgttcaggttctaccatcccagctaaactacatcttttttgaggacagaaaagcggaatgtggtctatttcaacattgctgtacagacacactatggggctgcacagagggctgctttcaggaaggacagtcacaaaggtcttgaggggaaggagctgagaggaaataaacaaaacaaacacgaatgaggtggagcccctcatctagaaaggcttccagttgctctccagtagacagcaaaatgaggagagaagagctgaacagccatccttcccgattttgctcctgcaaggatacctcctggcttaaaaattaatgtcagaatctgggtcaaagtgtcaacttctcctctgacattttaagtccaatgagacactgcttggtaaactgactaaaaaaagagcgttttaattcaggcagctggaagagcacttaaaaggcaaccggttatctgggaggtgagagataccattttccactccctgaggcttgcgcggagaactaaaaggaaggagtgttaaaatgatgtgtcagggattctcaaatccgactgcacatctcattcatttggggaaattttcaacactcagattcgcagcctcctatttggggattctttttccttaggtctgaggtaggacctggtctcacgcacagccaggggaaggagctccaggtggaggccttgcttttatgctcagcatcactggggtctgttacgggctaaaacgtgtccccctagaattcatatgttgaagtcctaagctgccagtacctccacctgtgactgtatttgcagatagggtcgaagaggttattaaagttaaacaaggtcatcagggttgatcctaatccactatgactggtgtccttgtaggaagaggttaggacacagcagaaaaacagagtgaaggtcatgtgaagatacagggagcagacaggcatctgcaaaccaaggagagatgcctggggaggaaccaacctggctgataccttgatcttacactccagaaatgtgagagggtaaatttctgttgcttaatccacccatctgtgttactttgttatggaagcccgaggaagccaagtctttggcctctggcatcaaagaaggcaacttcaacggacagaccggcaacaaagagaattatattaaataaactaaaaagtgctcttgaaggccaggcatggtggctcatgcctgtaatcccagcaccttgggaggttggggagggcggatcacttgaggccaggaattcaagaccagcctggccaacatggcaaaaccctgtctctactaaaaatacaaaaattagccaggcgtggtggtatgcccctgtaatcccagttactcaggaggctgagagtgaggtaggagaatcgcttgaacctgggaggtggaggttgcagtgagcggagatcatgccactgcactccagcctgggtgaaagagcaagactccatctcaaaaaacaaagaaacaacaacaacaaaagaaaacaacaaaaccatgaaaaaaaccaaaacaacaacagcagcaaaaaaggggtcttgaattactcaagtatgaagacatctttatttgctcaaatatggaattaaatttttttaaaaattaatttgagcagaaatgaaataagctgatactaatgaaaacctatcttacactgttttgagggacataagcttagatactatcacaaaaggtgcaatggccaaacatgacagtggggtcattgcttttatgtgctcacactctgatctatgggtcagtccgttcctttccaccctgctgcctgctgttctcttggtttccttcctcacactgctcatccacgtcagtatgaatggggaaatgaggctccaccccaatttccatcagcagcttctgttgtagtctgcagaggttttaattgctgagcaaaatgaaatttctggcttcaccacaaatttcatttatttaaactctgcctgtcctcttctaatcaagaatggtttagagcccatttccttggggatagtggaatcttcaactccctagaaacacctggacttttctctgatggaaaaagcaatgggggccagacgcggtggctcacgcctgtaatcccagcactttgggaagccaaggcgggtggatcacctgaggtcaggagttcgagaccagcctgaccaatatggtgaaaccctgtctctactaaaaacaaaaattagccgggcatggtggcgtgtgcccatagtcccagctactcaggaagctgagacaagagaattgcttgaacccaggaggcagaggttgcagtgagccaagatccagcctgggcaacagcgcgagactgtctcaaaaaaaaaaaaaaaaagcaatggggaatatgaggggaaatctggactctgagcttgaccttgcataatttgaacccttctgtctcggcctcagttccctcatctacaagatgagaagatcaatttgattggtcatcatcaataaatctttcagctctaaaaattccataactcttaaaatatcgcaattaaatgtcacacaaatttttcagtttccctgtgcatataaaagttatgtttacactatactctctgcaagacagtttcctaaaaagttgcatatactgtgagattttaacactttttcccccatccaaatggcatttcaaatgcataaaaataacttattcgtaaattttctttctctctttcttgttttagtatagcaccttgaaactaagatatttcaggtggaagtgcagggtaataggttgcagaactctcaaataacaatcatgtatgttttggtgggccatttggtatagtgtgatttcctgagaaactttaaaggtaagagtctgcactgaaaagtcacattatttactattacctggttgtattgagaggccagactatttaagacaaaagaaatccaagaataaacatgtttagtttttttggaaaaagcaacttcctacttctatttttatttttaacttcttgtactggtttttgttgcttgtgtttgaaaaaaaaaagtctaagagtaatcatgcttttttaaagtcatgcattatcatttgtattattttgataacttcaacacaaattgtaagttgagataacaacacacactctcaataccttgagcagaatattcacggtaagttgcaatgaatgaaaaccaaaacaagaaagaacaactgtaacccaagcatcatggaagcacactgattcgttttttaaaagagatacttagctagttcttagcaaaaagctaagcctaattctctcatagtcttaattcccacttggaaacatgcagtcaagtttacctacctccaccacaccatgatgaatggatgtgtactgtttcttcttcagcatcaccaaggtgatgacgatcactgtcgctatgacaacaccgcccaccatgagtccaatgattgcacctttgtttgaacccacatcttctgcaaagaacaccttgaaaacaaattaagaaaaagaattttaatttctaaatgcaatataatttacaatttataaacgcaattagaagaatttcatttcttaaatgcaggggacatttggatgaggttatataaaaagtttcagtatattctctgcccaactggttggtcaaatatttgatgcttactttaaaaaaaaaaaaaaaaaaagaaatcacatattttcctactaagaatgataatcatagtttatagaaggatgtacaacatgtggcttccccagttcgaggaagtctactttccccacaggtcaaaaccgaagtctgcagggacctgaaaccctttgacaggtggaacatttggtgagtggtgggaagatagcgcttggatctatcaaaagctggaaaggcacgatcatactaatgaaaggaggtcagcattttcctagtcatagcactctgagccctgatgtgtgactctaagtgactgagacttaggtgtttttcaactctgcagatgtcctaatttccttggagggacacttttaatgcacaggaataggcattctgaaacaaaggagttaaacaatagaaaaaaagatatcttgttacctacttttagctatagtaattctgcagaattctaattaacctttagcagtgtaatgctttttaaagcataatgttatttcaaagtgaagtacaggcaacaagaattttaagtcactcataactcatgctttctaactattgtctccagaaaccaaaatctgaaatgttgctttattcttgctctttatttggattaaacataaaaataattttgagaacattgtaaagaaggaataaaatttcatttactgcactacattgcttcatactgtttataaaagcaagtcattatttttcaactttatctacttgaatgaaattatagaagcacaccacaacttttatcatcttgttatataaggagttgatcttatgccagatgaagtaaaactaaagctaaatattaccacgtttgctctgcaacttaatgaaaatacaggcatacatagctttattgtacagtagtgcttacagatagtatttaaaaaaaaaaaacaaaaaggtttctggtaaccctgcatcgaacaagtctattggtgccatttttccaacagtgaacacaggttcacttcatgtctgtgtcacattttggtaattatttaaatattcaaacattaaaaattattatatctgtttggtgatctgtgatcagtggcctttgatgttactattttaattgttttggagtgtcatgaaacatgcccataaagacagcaaactaaatcaataaatgttgtgtgtgttctgtctgccccccaaactggccactccaccccctcaactcccaggctccctatcccttgagagacaacaatattgaaagtgggccagtaaataaccctacagtggcctcttaagtattcaagtgaaaggaagagtcacaggtctctcactttaaagcaaaagctagaaataattaagcttagtgggcaaggcatattgaaagccaagattcttgtgccagttagccaagttgtgaatgcaaagaaaagctcttgaaggagattaaaagtgctactccagtgagcacacaaatgataaagcaaaacagccttattgctgatacggagaaaacttttagttgtctggatggaagatcaaaccaaccacaacattctcttaggccaaagcctaatcaagaacaaggcccacaactgtcttcaattctatgaaggatgagagaggtgaagaagctgcagaagaaaaaaaagttgggagaggttgatttcatgaggtttaagggaagaagccatctccataacacagaagtgcaaggtgaagcagcaagtgctgatgtagaagctgcaataagttatccagaagatctagataagactcctgatgaaggtggctacactaaataacagattttcagtggagatgaaacagacttatttggaagaaaatgccatctaggactttcatcactagagagaagtcctgccttcaaagcttcaaagaacaagctgactctcttgttaggggctaatgcagctggcgactttgtttttgaagccaagactgaccattgtaaaagtcctagggcgcttaagaattattctaaatctactgtgcccatgctctataaatggaacaaaactgggatgacagcacatctcttaacagcatggtttactgaatattttaaacccactgttgagacctactgctcagaaaagactcatttcaaaatattactgctcactaacaaagcacctagtcacccaagagctctgaaggacaggtacagggagattactgttgttttcatgcctgctaacacaacatccattctgcagcctgtggatcaactttcaagtcttattatttcagcctcttattatttcaaaatatatttcaaatatattttgtagggctattcactgccatagatagcgattcctctaatggatctgggcaaagtaaactgcaaaccttctaaaaaggattcaccattccagatgccattaagaacatctgtgatccatgggagatcaaaacatcagcaataacgggagtttggaagacaatgattccaactctcatgggtgactttgaggagttcaagacttcagtaaaggatgtcacagcagatgtggtggaaataacaagagaactagaattagaagtggagcctaaagacatgactgaactgctaccatctcatgatcaaacttgaatggatgaggagttacctcttatggatgagcaaagaaagtggtttcttgcaatggaatctactcttggtgaagatgctatgaacactgttgaaatgacaacaaaggatttaggatatcacataaactcgatgaagcagtggctagatttgcgaagactgactccaattttgaaagctgttctactgtgagcaaaatgctatcaaacagcatcacatgctacagagacatctttttgtgaaaggaagagtcaatcgatgcagcaaacttcattattgtcttattttaggaaattgccacagccaccacaaacctcagcagccaccacctggattagcctgcagcagtgaacatcaaggcaagattctccacgagcaaaaagattaggacttgctgaagactcagatgatcattagcatttttagtaataaaatattttactaataaaagtaaagtatatacatggctttttttttttttagacataatgctattgcacatgtaacagactagagtatagtgtaaatacaaacttttttttttttttgagacagagtcttgctcttgttgcccaggctggagtgcgatctcggctcactgcaacctctgcctcctgggatcaagagattctcttgcctcagcctcccgagtagctgggactacaggcacatgccaccatatgcagctaatttttgtatttttagtagagatggcatttcaccatgttggccaggatgctctcgacctcctgaccttgtgatccacctgccttggcctcccaaagtgctgggattacaggcatgagccaccgtgcctggccaacataacttttatatgtactgggaagccaaaaaatttgtgtgacattttgttgcaaaatttgttttattgtggtgttctgaaatttccaaggtatgcctgtacctccctaaaaaattctttcaatttagcctcaaggtagtcaaatgactgatttttctaagctgaaactaacatactagcaatctggaaaggcaatataaaatatagcaaatgaagcaacttctaaaagtgttttactcgtggtttataacaaaatgagaaattgttcataattattccctttactaaacaaatatgctagctcaacatttttatgaaaagcaaatcattaattagctaatatactagtgtgaggtaatcaggaataaatacaagtctggacatatgcctgtgcctttaagaaaatactgtaattttgtaatattcattgcactaattataatacattatcttaactagtccagtagagggagctgattctcctaattgctgccgctgccattagtcactgtcgcattataggcgttagtgtaattgtggggatgggcttatatgacacaggccccaggccccgacaaatgcaaatctgtacattaatcgtcagctttctaccccaccaactcttcaactctttagtggttccccagtttttattaacctcttcagcaacagcctcatcaagagaaaccctgatcttataacaactgatactagattatcttgccaatgaaaaccatgcttcaaaaagctaaatgtctttctacaaaaaaagaactatgggagttaagaatgcaaatccaaatcccaagtcagttttttatttgctacaattatttggagtcaagtaaggcataaataataatttggaggtgtttcttttagagattaatactaggatttatcaactttatgaatattgaaaagacattttctgcttggaaaaaagtaacactcacacacacacacacacaaaacaaaacaaaagaagtgcctgagataactttaagtattattgctatggaaattttcttaccatttttctgtccaccactgaatgtgataaaattgtcgtcttcattaatttaaccctcttactgcacctactgataagatggaaccctaacataatccacgatttgatttatctccatttctaagcttttggtaaaggattttatataactactagagctgaccacaaaggagatgtggctttttgatttactccaattctaacattaggggggaaaagtgatttcatctgaaaaggaagctgctgtcttctttgcacaaaccttttgatgaataacactatcgggaacatcatggggtcctgctcactccatgatcttactcttgcaagagaagttaaatcatgggaggtaggggagggaatgaaaagaaagagctgggggagaaatgaatgggtaaaggaagacagttccggatgtgaatttaagccacataaagtgttctgtaaaaccaagcagtgtatgcatgtgtttgatccttcaaataaacctattgtaaacctattttcccagaaaacacagtggaagtcaaagtggctgctatattgaaattaattccactttaagtcccgagtcatgcacgaactttgctgccttgtagtctgaaagaactatacatacagcctctttcttttcttttttttttttgggatggagtctcgctctgtcgcctaggcacgatctcagctcactgcaacctccacctcctgggttcaagcaagtctcctgcgtcagcctccccagcagctgggactacaggtgtttgccaccacacccagctaatcttttttgtatttttagtagagatggggtttcaccatattggccaggctggtctcgaatttctgacctcgtgatccacccgccttggcctcccaaagtgctgggattacaggcttgagccactgcgctcagcctagcctatttattttcttcatgttttcatggtaatcctataggcaagcattgtatttttatcttttccttaatttgatttctagcacaggatgaaccagagttaataggtcatttggcaagacaaacagtagtggaaagaggtaaattattttacgtaccaatttttgatgatgaacttcatatcctgagtcatgtcggaattctgcatccatcttcacttcagagatctcctccgtcttgatatttgtcaacccagaacctgtattacatcataattaaagtatgcaggacaaccaattagttttactcataaataataacactgtaagacaaagcctacccaaaacttctttctaggcctgaagttagaagaaaattgataaatgactcttaaagaaaaatgataccctatatttaaaacttcaattactacctattttgaacaaaaagaaatgaaagggtaagggaaacctgaaagtaaggcttctgctgcctttaaatacatgctataatttttgaaaatgggggaaaagcagaagttaaatcctggttgagaggttggcaaggatttgttcctggaatatgttggcttggcttacgggcttattgtttagcctattatgtgtctttttccatgtgcactcattacttcagaaataataataaaaggctttaaaaatgagcattaattacctggtagaacaaaactgctactttggggctttgttccaattacaaataaattatgttcatgtatctatgcagtgaagcgttgtaaaaattatataattttagtcaagtgttctagttacacagattgtaattggttcgtctgctgaataaagagctatagtacataattttaaaaatgcttcttagcaactaacagaatttataacctacgaactcttccttttctataaattgctatatgattcttaacactaattgttctgatgaatttcattattcaaataataatttgaagcttaaaacaaaatgcagagtcatttaaaaaccaaaaacataagtaaaaaatgtaaatgtcagtgtccatgctataacatttaattatcaaacatcagaattttaggatgaaaagggcttttgaagtcatcttctctaccgtgttcccacccaggggcagattgtcagttcctgtttgaacatagaggaatgtatcaatttccctccattttttgatagatttgcctgcccaaactgtcctttttttacatgaagccagaatcagcttccctgtaacttccatcctttgagcctgattcaacacagagcaagcctaatcctcccttccacattaaaaccttgaacaggtatcacgaccctaaggagaggcatgttcctgctggttcttgtcttacttgggctacacattcccaattcctttggctcccaggggaattcacttcctgctcttggcctaatcactctttcaatcttgtctacgagattctgggaaacttgtgacacatcttgctgacactgaaaagcacaatgtccacagcatatgatgtgccagtctaagagcacagcctatacaaggagaaggtaaggataatctgacaaaacctaggaaatccacgctggttgtgacctagcaccatttcctcatccaattgttcaaaaagcttccacttgataacctatttgaaaagagacccacaatcaatgtcactctatacctggcttacagattgtgaagctatcttctctcctttttgctattcagaacttcattttcctatccctaccttcccagctttccacaaagaccacaggcaatggtgctacttccccttcaagttctcttagcctgcagttggtctgggtcataagaacttggacttgggtagcaagatgtcatagtttaaaatatatccacaaatttgctgatactccttccttcaagagggagaacttgattcccttccttcgaatgtggtcgggatgtagtgacttgctctagtgaacagagcatgatagaagtgatggtgtatgacttctgagactgggccaaaaaaggcactaaaacttccttaatctctttcctggacctcttggtgcaggggtgcgagatgccatgttgtagggacgctcaagcagcattacagagttcacatggtaagatactgaggtctcttagtaacagtgacgtgagtgagccacgttggaaacagacccaccaggtccaatcaaaccttcagatgactttagctcaggcagtgtcttaactgcaaccacatgacggacactgtgccagaaccatccagctaaaccacatcccaaatcctgacctataaaaactgtaagaaactaatgcttgttgttttaagctgctaaattctcgcgttatttgctacgtagcaataggtaactaatgggctagggctttcttttctcatgttgatctatctcgggctttaatttcctttcatcagaagttcattctctttaatatagacataaaaggcacaatggaagtgggacagtttccctttctcattctttaactctggtcctctcaatgacctaaccctcaacccccaacttcttgctacgagacccacagagttctctattcttatttattttcttactttaatattgttaagtattttttggttaagtttcaactcattctgctgaaacgaacctttctgacacttatttttatagggtagtgatgctaaaactctcttaattctcactggctgtatattttaatctttctatagcccttttaaatctgagatccttatataaccagtgatttctttagagctcactccttttctgttattaagatctggcaacgtgccaagcacggtggctcacgcctgtaatcccagcactttgggaggccaagctgggtggatcacttgaggtcaggagtttgagaccagcctggtcaacatggtgaaaccctgtctctactaaaaatacaaaaaaaaaaaaaaaaaaaaaaaaaaaaaaattagccaggtgtggtggcgggtgcctgtaatcccagctactccagaaggctgaggcataagaatcgcttgaacccggcaggtggaggttgcagtgagctgagattgtgccactgcactccagcctgggtgacagaatgagactctgtctccaaaaataaataaataaataaaagatctagcaacacaataggttagaactatatttctgagatttttaagaaaactttcttgaacagtttgaagagtcttcccttttagattttggagccaaatatttatactgaaaaataaaagtaaagaatgagctctggccgggcacagtggctcacacctgtaatcccagcactttgggaggccgaggcgggaggatcacgaggtcaagagatcaagaccatggtgaaaccccgtctctactaaaaatacaaaaaattagccggacgtggtggcaggcacctgtagtcccagctactagaggcttaggcaggagaatggtgtgaacccaggaggcagagcttgcagtgagccgagattcgtgccactgcactccagcctgggcgacagagtgagactccatctcaaaaaaaaaaaaaaaaagaatgagctctcggccaggtgcagtgactcatgcctgtaatcccagcctttgggaggctgaggcgggcaaacagtttgaactcaggagttcgagaccagcctagccaatatggcaaaactctgtctctactaaaaatacaaaaatgagccaggtgtggtggcacatccctgtaatcccagctgcatgggaaacttaggtgggaggatagctttagcccaggaaatgggggttgcagtgagctggtatcatgccactgttctccagcctggaaacagagacaaatcctgttttaaaaaaaaaaaaaaaaaaaaaacaaaaccaagagctctccactaaaaactttacaagcccacactacttttgaaatgatactgtgaatacttttggtggtccaaaaaaaaaaattcatattatcaagtcagcatgacagataaattcatgtttacagctcaatagtttgagaagctcttggcagaagagctcttgctataatagttcatgtttgtttagcatgaatagtcatctagggaagactttttacattaagcaaatcttactaaaagacaaaatcagtaagctggcacatagggaaatattcataataaggtgataatgcatgtaataaaatgtgatgagtagtttcaaataaatggcagggaccttggtttgcaggcttacttagaggtctttcttgagttgtgctgatttcaccctaagccctggtgactccagctctctcttcctgtaagtcatgatgagtggacagagccttttgttcatgtgggggctaagggaggtatgtccttcatgacacctcttgcatggctcgggtcaaggacctggtttccctttatttggactgcagaagggtggtgatgaattgtaacagaaagggtagctttctaccctatgtgaagagctcgctaatgtgtttttcttttttattctggtcaaactgtataattagtccttcagagtctattttttctttggaagtaagccaggaggaggagctataatggccactatgcccccaaatcaccactgttattacaatggtccctacttgacactgcatgctggaagctaccatattctgtttttttagatatgagagttaaggagaagccattttcctcagtcatgattataaagcactgggtgggggaaaaacaaaaacctttttttaacttgtttctgaggacaacagtgattattcaaaaacaatgccatcacttgaacggcatgacaatcttgggaaggctttctaagtttggaaaggctaaagatataattcggcacattagactcaagtgggtggtctctaaaatgtgaagaagaaccaaagctatgctacaaaacacggggaaattagcccaaatgtttgataaacttactacaagcacaaaaacagaacacacgcatggcttaatacatgtgcagtaaatactgctattcatagacaaaccttaactagaatcttcctcacttcatatctgagcattctttctcaactttagccatcttactgggcaacccaagcctacgctgtgtatgaaaggaagcttggcttaggccaccctctcttctgaatagaattgttcccttcttctttgccaatccaggtgcctcaaatctttcataacctctctggaagcccatctccagtaagttctctacttaacatgcccctgggttagtactccatctcctcccatcacagaacattcttgttagcacttaatgttgctttgtatttccttgtcttccaaattccatctcatgtttccaaatatgcaaaattccttctattatacctcaagctcctgagagcagggaccctaccgtttaatttctttcaaacctagaaagaatttagtggattgatctttgtgaaatccccaagtgacatcatattcttactgttatgagaaaggttttggatggttttctcccaccagtgtaataccattaactattctctagctcttcctttaaaacacactgtttttgtttgacagcgtttggaggtgtcctttttgttagatttagattaaaaaaaattttttttaaaagaataggccgggcatggtgcttatgcctgtaatcccagcactttgggatgccgaggtgggtggatcacctgaggtcagtagttcgagaccagcctggccaacatggtgaaatcccgtctctactgaaaatacaaaaaaattagctgggcatggtggggcgcatctgtagtcccagctacttgagaggctggggcacaagaattgcttgaacccccgaggcagaggttgcagtgagttgagatcgtgccactccactccagcctgggggacacagcgagactccatctcaaaaaaaaaaaaaaaaaatcaaaaaacaatttttttaaaaaagaaaaaaacattgactggtagtgtcacctgttcctggatgtttcaatagtaacatataggctctcctggcccaatgtagaaatttgataaaattgaatgagtcgaatgagcgctttctaagttacattttatgcttgtagatgaagagcatgtcttttaaagagaagcaccatgaaaaaagtcccaaggcaaatgaccaacctgagctggctgtggttgcaattagaactgaactgaccctcagcccgaggccttacaagttggctgagcagaacaggaatgtcaactcctggctccttgagattcccttacatgacattgacaataaggaggacattagaagaactgaaactgtctctgactcactataatttaagttccccttaaaagcctacagacagaaattcataaatcaacgagaccagctgtcaagacgtgtcacactactgtctctgctgccactgttaatcacagcataaaggcatgaagatgccacaggcagactctcagtcttcatcagtgaccgtgcttggaggcagtcatggctcgagcctgtggtggaagtgtgagggacagggtgggtctcctggtctgctgctgactgtatctgaaccaggcagcaaaggttgacctctgtgtattaatatcttcaaagaaagttaattccctgttctttgactatcgcctggggacattatgaggataaagaagaaaataaatatggaaaagtatgtgttatttgggattaaaatctccctggaatacacaaatttgtcaattcaataactttcttcctctttttgattcactgaaagcactggctactatcagttgggtgaggttgttcatagagtagacaccaggcacatatatgcttctgctgtgctatgacattattcataaaataaaaatgtgtttcttcttaatgtttgtgaaactgtaaaaaaagaagtgtctatttcagtgttaatgggatttttaagtaatacataaaaaaagggcttatgtgcaaaattatgcatccacatctgttgtgttactttagccactcattgagaataagtacatacaacccacaaaacagaagatgtattttgggctctggaaagaaaccaattctggtattttcaggaaatcatgtctacttcagtaactgattgaagtttgagcccagttcagttagaaaattacccatctggacaccaaacaagaaaggagagatgttcacactggtatccaagtcatcacctgagagtctacatctatctgggcttctgtttttaaggacaggctgtatataatcgtctctgtttttgttttgttttgtttgttttaaagaaaaaagaaaaaaaaaaacccaaatttggaagggctctcttttaggtttcaaagggaaagctcagaaacaaaaaaaatcatttcactcggaacttgggaaatgaagagtaaggaatagtcaaggggaatttttaaaagtttggtttctaaggtcacttcaaattctactctgcagtaagtacaattgagagaggcttaaaatgcagaaaggagacaacgtctgctcgagcttaggcccaagatgcggagaggcacaagtcaagcggttctgatacctggtcgagtggtcagtcctcggtcggcagcagggcgggcatcaacaggctcaactgggcacaggaagcaagggacacagaaagcaaacaagacaaatcaagatggtaagtcgtggctcccaaacatagtcgagcagggaaaaaagcatatgcaataaacaagttacaaaaaaggagcagccagaaaagaaccacagtgagttaatcccgagcatcgaggaccaggaggggcaccactttaaatggcttatcgctattgatgtgccagtcctgctccttagttttctaataaaagccctcaccaggatacgcagcaacatcaaagaagaggggtggggagggtggatttccctctgagctagtttagagatagtttcttggcttttgattagaaataaaatattcccagcctagcagaaaaccttaaagatacttccttttacaactgcccaatcttatcttattttacagttaattaactacaaaaggactctgttaaatttccaggggaagtgcaaatatgaatttatcaggagagcaaagttttactatataatctgccatttagtgagtgaatcaaatttgtccttagtatgagggcagaagagggaaaccgcagtctttttctcactttttcaaaaaggctggcttccatttgacagatgacatacagctgaaacgtgtgaaatgaggatatttcattttatatttgccattgttcacaattttccctttttatgtgttctgggtccgacccaaagaaagcagtgtggacagcatgatattcctcaccatcatctgacctttccaaagcacttctgatgctcagaaaatacttccttgttttacgctggcgtttgaagaaacaaggaatggggacaaaagtgaagtttttaggattaataatggtcatagggtaaatgaagccacggaggtaggtgcagggggaagctgctttggtaaggtggcaagtgtaaagggaaaaaggtaagacaaagtgagcacaggtgctgaaggagacacggtgtgctcgatgaaatggcttctaacaatttcagcaaaaccatccagcttactgatgcacacaggccaggcattcaaaggtgggattctcagtccaaatcgattttggatgccacatgttaatagaaacagtgagggagaaaaaaagtggcagtaagccaagtctccaaaatataagaaaatatttccgggagcactaggatatttggatgaaataaaaatttggtcctttctcatgtagagactggcagcatggtggagtcaaaaggagggtgaggcatctaatcccaggcctgggcccaacatttacaatgtctgtggccttgggatgcgccacttctgtggctgtttctccatatggaaacagaaatgttaacatctgcatcttctaattatggtgaggaacaaataagtaacctttaaagcctgtttgagaccctaccagatactacagaactgcactgattaaatatcctatgattaaatattccatagtaactactgatgcgagagtgactattctctagtatttcactagtgcattagaggaagacatagttcacttccttctgcaactcccaaatacatttcgacaatgaggtttggtttttctatacttcattttttttcctatttgcagcaacctgtaatgagtaactgtattactccttgtaaaatgcagttagttgaaaggtcattgtactttgtgagaatttcctgatgatgagggacccaatagtgcttcaactgcagttaagaacacaacagaccacatgcacgagggcaaacgcgtaccttgaagtggtggtgagcacatacatcaatagttacgttattagaaaatgtatatgcaactcggggcagtaagttaagtgtacctgtggtttaaatgcaggctgaggagctggtagtcccacgggccactgctaatgtcaccacttactttctctgtgatctggggctaatcacattctttctgaacttcagttgtgtcacaaagtaaatggtttttccagggttcaaatgcgtatacttatgtgaaagaaacttacaaatgatattgtcctataagtttctctgcctctccccgctcttcttcttcttcttctatttttttaaataggcatgtattatttaaaaacaataataaaaccctaaccctattttttaggaagattaaacaaaactagtttcagtgacataaaccctaatctgctttaaaagattgaagctgatttagtataaattaatgctcaaaaaataagtagctcagggagcagacattaaaagttttttaaaaggcaattatgatatcattgccgaaaaaaaagaatacacaccaacaaaacaaagtagtgtgttatttcccaatccactgcaaatactttccaatttttccaattgacctttacttaaccagacagtaacttcatcaatgaagtgctaaaaaacatcttacattggctgtttagtaatttaaaaacaagaaatacattatcttagctttaacttttaatagagttaaaataaaatgtaagcagaaatgagttattctcttgctctcagtagctttgaatcaaatcctttgctgtaagaggagagaaacagaatggtcagacctctgggatttttgagtctgttacttctggtattctttgtaataaacctcaactattaaccgtgctgccttgtacaaactctctaccaggccaaaggtaatgaggaatcagcagtacaccagttttacatatagataagaggctgacaagaactggtttgtaagtttaatgaaatatttatttaatctaaatttcaacatttaaattggcttcctcattgcctctataaagctagttaaaaatatactagaaggcagcttcacattttgcaaatacatccatacaagtcttataagacctgctttgtctctttaaaaatattattttatctacatattatatctaggtattatctacaaagaggcagactgttggccacaaagacttgctggcagtcactgcatgctatgctgctctttgtggctgcccttctcaggcagtcaggaaaaagtagaacaaacacaaatgtcatcaacgctaatgcttccagccagatcatttcacgatctgtgagcacaattctgtaacaacagcttcatttcagcctagccattcatttaggttttgtggatgtgaaaaccaaagaataaaaaattgttaaggcaaatcacagcacattggaaaactctgatatgcttattttcttcaatgtaaatttaaaaaatgggcatcagaacctcctctggatttcactgattgttcttaagaaaaacaacaaatttttggtaagcatttgaaactatgataatgaggactgcatgaagaacaaaaggaaatcctttgagaattttagatattttcagtagttgggtgtatgtgtgtgtgtgtgcacatgtctgtacaaagaaagactaacaagtttctggggagaggtgggagacggtgttagaagagagacggctttaggactgtatctcattatatggcttattatattcattattttaaggatacattgttgaggccataaggtgattcatcttgagacaggctgataaagtctctctaataagatcctggctccattaaaaaaaaaaaaagctaccactgacatttactacgttccaggaattttgctaagagcttttttatgccttcttatttaatgctcatactatacctctgagttaggaattattgtcaaccttattttacagacgaggaagcagccagagaggctaagtaacttgctcagaagcacatagcagggctggaatttaaactcgggtctgtatcattcaggagttcaggggtatggggtagtatttaatatcctatgagatgatggccgtctattttatttaaaaaccaattggggccgggcgccgtggctcatgcctgtaatcccagcactttgggaggctgaggcgggcggatcacgaggtcaggagatcgagaccatcctggctaacacggtgaaaccctatctctagtaaaaatacaaaaaattagccgggcgtggtggcgggtacctatagtcccagctactcgggaggctgaagcaagaaaatggcatgaacctgggaggcagagtttgcagtgagctgagatcgcgccactgcactccagccagcctgggcgacagagcgagactccgtctcaaaaaaaaaaaaaaaaaaaaaaattgcttaagtggctttttaaattgtttgctataatcaatatatatatgtcaatgttgggactgataatgaagagtactgcaactcaagactctgacactgcaagttctattgcctcccaaaattgttataccagattctactgttcaaacagaatcatccaacaagaatatcagctcttttcatgagacctaggcaatgtaatagctgcgtgtttgtcaagtatccagaagtacttaatcaagggctttgctcaaatggacatcctggcaattaccaagggttcacagtgtatgtgtgtgtgtgtacattcacacgtgtgcacgcagattttctcctaaggctgatgcaacaaggtatgctgttagtaaaagagcaaatttagcgtgcattcaatttacaaaatgagatcggacatttttcactaaaaattctcattagagactgaatgaagaggaccttcaatgaccaaaatctatctacctgtaaagaaacaaaacaatctgcactcaatacatttaacaggacagttttccaggtctttgataatgaactgtccctaaaattgttttcttctatgtgattaagaattattttcataaatggtaaagttttaattatttttacattgtcagtaacatgctgtttgctattactgtaaggtgccctttttcaaattaaggaaacaaatttggggtgatgattcacattgtgaaaatagtctatatattttctgcaatggttctttagaaaaaacttgtccagtacacttaaggtctaatattatatttagatttagtactaattgcatgttataaggtatatatattttttactttatttatttattttttttaaatttaaagtctcgctctgtcacccaggctggagtgcagtggtgtgatctcagctcactggccacgtccgcctcccgggttcatgccattctcctgcctcagcctcccgagtagctgggactacaggtgcccgccaccacgcccggctaacttttttttgtatttttagtacagacggggtttcaccatgttagccaggatggtctcgatctcctgaccttgcgatctgcccacctcagcctccctaagtcctgcgattacaggcgtgacccacgatgcctggcctataaggtatattataaatatgaaatctccatcaacatttgctgctttgataaagaaaatcaggtaaagtgctgttgtgttcttaaaaaacatgttatttgtatctagaaatcaaggtgtttgtgtgtaattgtatacttctgaacatgtagaaaaagataaaagaagctgaaagatattcttgcctgaacaggtgtttctgctaagaaatccctgtgaaaaaggatgccatctactgctcaaatttgttgatagagaagaatcttacttctctgaggtaccaaaggaaaaaacatttagagcaatgtgctccttaattttggcagctgccttaaatttaattttctaaacacaaattaagtcttaagcaaaattaaattttatttatatgtagttctctatctttgcctttaacatttaattcaatctgaaatttcatgtaagaataagtagccagtgaagactactttggtgcctgtcaaatctgcatctctgcaggccctcaaaactcctctctgttggtaaactgtaatttttccttatttcactatctatctgcttttttggaaggtggcattctaggtcattacgtcataaacacaagttgaattttgtgcttccattccagagggaacaatatacctcacagttaaaaaacatttctaaaaaattcctaccaaaagtcatcacttaagaacttagtctcctggtgcctccatttcctcatttgaaaaagtcataaacataataatatgatatacagtacatgctctttatgtatccacttttgttatataatgtaccattttatattaagaagaggaactggaaaataaaaattagaagaatgttattgccacacattttccttgtgaagaactgcctcttcaataatacactgtggctccccttcgtccgggagtgttcactcgaaggataatattccctagaatgcaaacctggacatgtgcgaaacaagaggccctttacctgcaaatgttatgtaaatcattaccattttgttttgccacctatacaatggagttgttgtcttttccaacaattggcagtttacatgctttgcagcataaaaaatataaagaataatttacacagatatattattttaatgacatagtaactcctagtatttactttttaaagtaaaattataatgaaaatatttatgactacatcaaaaaaaattcaccactcaagaacatacaaaagataactctctctcttgcacacacgttatgtatgtgtatatatacctcccagaacgcccttgctggctcaggggactcttaccttcgttttctgtgttggctggcacagagtcagccccaaaagaatgccacggctggagatcgtccaggctgaactctccattcacgggaaggagctccacggtggttttcgtttcggtcaaagatggcatgagagcatcgtttccgtaactgatccttggttcactaatcatgttggccaagacgtcatctgaatagttttgctctttctgaagcagctcatctaaaccaaacaaaaccatctctttggtgagtaacaacaatcacaacagcagcagcagcagcagccaccatttacttctgccaggcaagacttcaactgctttcacgtgcatgatcgcgtttagagccatgacataggtaccattatcatctcccttttacagatgtgaaaactgaggcacatggcattcaagctacttatgcaaagtcgcagctcacaagagctgctggcaggactgcaggcaggagcatggcagccggccaatgtgctgcagcgtggcactgctagaggtgaaaggccacaggggctcagctgccatttcctcctgacacagttagacgtccctagtatacaatgatcgcacaggaataaacgccaggctttggtgtggcggcagtaagtgaggcacaatctcattcaagctgaaagacaacagacaatctcctgtcttgccttgcacacttgcaaggataagaaaagcattaaagggccagtagtttgctaccttcttgaatagttttcactgtcttgccttgaaaaaaaatctgcatttcctaaatgctcctcttgtgctgcatgacctatgctctgaggcaacaaggaaactgttcccttgcccttccagatgtagccctgcagacagacatccagccttctctggacttaaccacccctggctccccgtatttcccaatgtgagcagacaccaaatatcctgcctttctcctctgttgcttccctttccaaagaatgctgtcagtgccgcctacccccccactttaaaaattgattaaacaagaatcagctttatggaacatcattgacttatcttttcttactggaaaaagagagcttagaatataatcttgtatcatgtgtaattactgctttaaaaactgaccccaggatatgaagatttgtgagtcttctcttatgtcaccaaagattcaccatgtttttctctgatttttacaaattagagaccgacagacagcactgcactattaacaataatatttgattaaccaaaatgtctcattttccaatcatagctgtgtcaagagtttgctgtagtatatatttcagacacatcactggttagttttattgctagagaaaatgaaaataagatcaggatttaaatttgatttgtaacattttacaatcatctttcaaattctcttttctattgacaaaaaatgtatctgaaaaattaaaattctgttcaaatatacccattaaaataatttgatggaatagcattaaagcttgtgattaatatcttttcatgtagtcagttttattgcaagtgattttaaatgatggaagtcccaagcaaattagtccttttgaagtctaatctgagttataatatatccctattcactgtggcaccgtttctaaaattcaatacttgatgcccatgatgacctttcccttacagataaaagaccctcattagatttcctccaactttttcatgttttacaaagccataggtagcggctaataacttagccaatgtctgattaaataaattaaatgagcatttcttttatataaatcttttgcttgtgactgttaagcacttactatgctaaagagaggatattctggaatactaataattattggtgcatacacattcatcttgacaggaaataacctttgccagcgagaaagctcttgaactccccaggggctacgctgttcttgggtctgtggtatctactatcacttaccatgtcctttatttggaaatgttctcactgtttcgcatacacagtacttatcttcttccctgtgacatctctgaataactctttttactctttttttctcctctcttcatccctgtcattttcttcttgtatctctttccatctctttctacaattctcccctttggaaatcccatcgactcttgaaactctaaagatctcctacctttgggtgaatctgaaatgtacttccccagctttgacttctccctcccactcaaatttgtatatttccaacagtttgctggagataccaacttagggctccctcctgatccatgcacttggtaggtacacaactgtactcaaggtccctggctttcccttccacctttcctgttttctaatcatggcagaaccattctccctcccagtcacaggcttgaatccttcagagccatccaggactccctgtatttcttcgtgtccagtactcacactaccgacaaatccttttgcattctatttctgaattctctcagccatttcctgcttgcttttccacaccaccctcaccgcccctaggaatatgattacttttcgcctggataattacgatagtctcctcactgcttgctatggtctgaatgtcccccaaagtcatgtgttgaaacttaaatctccactgtggtagtagtgagagatggggtcttctggaaatcaagtcatgacagttccaccccgtgcccccgaatggactactgccttctaaaagggctagaggaaaccagcacaggcccctttatgtgcatctgccatgtgagaacagtttttgctgcctctggaggatgcagccacaaggcgccttttttttttttttttttttttgagacggagtcttgctctgtcgcccaggctggagtgcagtggcgcaatctcggctcactgcaagctccgcctcccgggttgacgccattctcctgcctcagcctcccgagtagctgggactacaggcgcccgccaccacgcccggctaattttttgtagttttagtagagacggggtttcaccgtgttagccaggatggtctccatctcctgacttcgtgatccgcccgcctcggcttcccaaagtgctgggattacaggcgtgagccactgcacccggcttgatcctgggcttctcagcctccagaattgtagtatttctattgtttgtttataaattacccagtctctggtatcatgataacagcacaaaccgactgagacaatggtctccctgctggtttttattttacgtttggttcctgaaatcttagttcctgacacacaagaatggctccctctttgtttcagtgggtcttcattttctaccgaattaattccaactcctttgccagatgctgaaggccctctgtggtctgggcccaccccgtatttctagccatggaactcacagctccagctgtctacaccacacctctctctcaggctaaatagcttggggtattcccacaaaagaccatgcatacccattctgacacttttgttttctattcctgctatcttggaagcccatctctgctcatctacgttatttgaactctttagagcccagctcaaatgccctctcctgtatgactctcctctcccaaggcaggcattattaatctgatgggacaaggagactgaggctgggagaaaggaaccaatctcttcaagacccaatggccagtaagcaccagtgctgaaatccaagtcctgggcttcataacaccagccttcccatgttcagcccctatctatttcagcctctcgtattatcacaaaagtagctgtagaaattaggcattattaagcatgtctgttccaatatctttagcagtctcttccacccttgtggatttgtaagctgacttaatcaccgttagtcctatggaatggttattgcttttggtcatcaaataagcatttctcaggcaggggcagctggaaagggccctgtgcccatcttagcccttggcagtaaaaaggcagaggagcaaaagatcacagtgagaaatcttacacttgtacttcacagaacagtcaggggaggttgaggtacgctgtagtacccttttctcttttctctgttacactgttggtagaaaagttcctccaaatggccaccagcatgctgagccccatggtggttaattatattcattttcagaaaatgtaagtgaaaaagtgacagattcaagaaaaggtacatttttagcagagtgaaacacacttagccttcgttttttttttttggtcgttgttcaaaataggaagaaatccacattcctatcttaattcaacacagaaaatttagaaataaccacccctggctatgtcattcagaacaacgaacctctgcctcctgggttcaagcgattctcctgcctcagtcccgagtactgtgattacaggcacacactaccatgaccggatagtttttatgtttttagtagagacagagtttctccatgttggccaggctggtctcaaactcctgacctcaggcgatctgcctgccttggcctcccaaagtgctgggatgaggcgggagccactgcgcctggccgtcagtgtagttttaagagaaaaaaagaggtagacatgatggattaccattatcagaagtggaattcaatttcgtcatcataaaatgtctaaggcagccagctacctgtagacatgactaagggctcaggattttaccagtggcttacacactggcactgggcaattgagcctatgacaaaatacccagagacaaatatgattctttcattgttcattctgagtgggactttctttgacttccatggtgagactaatcacaccgaaaccacacttccactacattagtggccctgatggattatccttttatctgaattaatttaatacttaattacaacactctgatggcctgcaatggggattttcagaacttttaagcatctatatttgccaaccgctatattaaactaagagactgcttattttcctcccaagacttattttttccccttctaaaagctatttgttatgacccaaaattgtagcgtttatctttgaagtcaaatatcttctataatatccaagcatttgaaccttgtagttaacagtggaaatatttaactgagtttagtggtgataatatttaaaatatggcttcatcaataacagaggtatttaatttcaaataccaaacacctaatgaaccccatcaccttgctcttttacaaatgcttcgaggtggccaggcgtggtggctcacgtctgtaatctagcactttgggaggccgaggtgggtggatcacgaggtcaggagttcaagagcagcctggctaacttggtgaaaccccgtctctactaaaaatacaaaaattagccgtgcatggtggcggacgcctgtaatcccacctacttgggaggctaaggcgggagaattgcttaaacctgggagacagaggttgcagtgagctgagatcatgccactgcactccagcctaggcaaccgagtaagactctgtctccaaaaaaaaaaaaaaaaaaaatgctttgaggatgtatacgaggcatacttagagtaacagagggaagaagccctaccacttagttatcattgtaaacactttaaagaaaacaacatcaaaagataataatttcatcttcaaacagctaaatattttgttttttcttagatattcatgatcattcattttgagaaaaatagccttataaataaaagaactgctgaataggaagcagatgaattcatccaatattcttttaattattaatccactagccaaatgtcttctaagaatttaacggtcacatcttacgattaaagaaaataaaatttatgggcattaaatcaatcagttatgtgttacaagtgtcagttataattactgaacagcttcttccatccactgaacacaagtgggttggagaagaacattttcttcatataaaggaggtgccactcagccttttccctgtaaagtctggctgttaaagctctgatctgaatctatccatctgacaaaggtctaatatccagaatctacaaggaacttaaacaaatttaccagaaaaaaaagaaaaacaaccccatcaaaaagtgggcaaaggatatgaacagacacttctcaaaacaagacatgtatgtggccaacaaacatatgaaaaaaaaaaaaaaagctcatcatcactggtcattagagaaatgcaaatcaaaaccacaatgagataccatctcacaccagttgggatggtgatcattaaaaagtctggcaacaacagatgctggcgaggatgcggagaaataggcacgcttttacactgttggtgagagtgttagttcaaccgttgtggaagacagtgaggagattctgcaaggatatagaactagaaataccatttgacccagcaatcccattactgggaatatacccaaaggattataaatcattctactgtaaagacacatgcacacatatgtttactgtagcactatttacaatagcaaagacttggaaccaaccaaaatgtccatcaacgatagactggataaagaaaatgtggcacatatacaccatggaatactatgcagccataaaaaaggatgagttcgggaggtgggagccaagatggccgaataggaacagctccggtctacagctcccagcgtgagcgacgcagaagacgggtgatttccgcatttccatctgagataccgggttcatctcactagggagtgccagacagtgggcgcaggccagtgggtgcgtgcaccgtgcgcgagccgaagcagggcgaggcattgcctcacctgggaagcgcaaggggtcagggagttccctttctgagtcaaagaaaggggtgacagacgcacctggaaaatcgggtcactcccacccgaatattgcgcttttcagaccggcttaagaaacggcgcaccacgagactatatcccacacctggctcggagggtcctacgcccacggaatcgcgctgattgctagcacagcagtctgagatcaaactgcaaggcggcagcgaggctgggggaggggagcccgccattgcccaggcttgcttaggtaaacaaagcagccgggaagctcgaactgggtggagcccaccacagctcaaggaggcctgcttgcctctgtaggctccacctctgggggcagggcacagacaaacaaaaagacagcagtaacctctgcagacttaaatgtccctgtctgacagctttgaagagagcagtggttctcccagcacgcagctggagatctgagaacggcagactgcctcctcaagtggtccctgacccctgacccccgagcagcctaactgggaggcacccccagcaggggcacactgacacctcacactgcagggtattccaacagacctgcagctgagggtcctgtctgttagaaggaaaactaacaaacagaaaggacatccacaccgaaaacccatctgtacatcaccatcatcaaagaccaaaagtagataaaaccacaaagatggggaaaaaacagaacagaaaaactggaaactctaaaacgcagagtgcctctcctcctccaaagaacgcagttcctcaccagcaacggaacaaagctggatggagaatgattttgacgagctgagagaagaaggcttcagacgatcaaattactctgagctacgggaggacattcaaaccaaaggcaaagaagttgaaaactttgaaaaaaatttagaagaatgtataactagaataaccaatacagagaagtgcttaaaggagctgatggagctgaaaaccaaggctcgagaactacgtgaagaatgcagaagcctcaggagccgatgcgatcaactggaagaaagggtatcagcaatggaagatgaaatgaatgaaatgaagcgagaagggaagtttagagaaaaacgaataaaaagaaatgagcaaagcctccaagaaatatgggactatgtgaaaagaccaaatctacgtctgattggtgtacctgaaagtgatgcggagaatggaaccaagttggaaaacactctgcaggatattatccaggagaacttccccaatctagcaaggcaggccaacgttcagattcaggaaatacagagaacgccacaaagatactcctcgagaagagcaactccaagacacgtaattgtcagattcaccaaagttgaaatgaaggaaaaaatgttaagggcagccagagagaaaggtcgggttaccctcaaagggaagcccatcagactaacagcggatctctcggcagaaaccctacaagccagaagagagtgggggccaatattcaacattcttaaagaaaagaattttcaacccagaatttcatatccagccaaactaagcttcataagtgaaggagaaataaaatactttacagacaagcaaatgctgagagattttgtcaccaccaggcctgccctaaaagagctcctgaaggaagcactaaacatgcaaaggaacaaccggtaccagccgctgcaaaatcatgccaaaatgtaaagaccatcaagactaggaagaaactgcatcaactaatgagcaaaatcaccagctaacatcataatgacaggatcaaattcacacataacagtattaactttaaatgtaaatggactaaattctgcaattaaaagacacagactggcaagttggataaagagtcaagacccatcagtgtgctgtattcaggaaacccatctcatgtgcagagacacacacaggctcaaaataaaaggatggaggaagatctaccaagcaaatggaaaacaaaaaaaggcaggggttgcaatcctagtctctgataaaacagacgttaaaccaacaaagatcaaaagagacaaagaaggccattacataatggtaaagggatcaattcaacaagaggagctaactatcctaaacatatatgcacccaatacaggagcacccagattcataaagcaagtcctgagtgacctacaaagagacttagactcccacacattaataatgggagactttaacaccccactgtcaacattagacagatcaacgagacagaaagtcaacaaggatacccaggaattgaactcagctctgcaccaagcggacctaatagacatctacagaactctccaccccaaatcaacagaatatacatttttttcagcaccacaccacacctattccaaaattgaccacatagttggaagtaaaactctcctcagcaaatgtaaaagaacagaaattataacaaactatctctccgaccacagtgcaatcaaactagaactcaggattaataatctcactcaaagccgctcaactacatggaaactgaacaacctgctcctgaatgactactgggtacataacgaaatgaaggcagaaataaagatgttctttgaaaccaacgagaacaaagacacaacataccagaatctctgggacgcattcaaagcagtgtgtagagggaaatttatagcactaaatgcccacaagagaaagcaggaaagatccaaaattgacaccctaacatcacaattaaaagaactagaaaagcaagagcaaacacattcaaaagctagcagaaggcaagaaataactaaaatcagagcagaactgaaggaaatagagacacaaaaaacccttcaaaaaaatcaatgaatccaggagctggttttttgaaaggatcaacaaaattgatagaccgctagcaagactaataaagaaaaagaggagaatcaaatagacacgataaaaaatgataaaggggatatcaccaccgatcccacagaaatacaaactaccatcagagaatactacaaaaacctctacacaaataaactagaaaatctagaagaaatggatacattcctcgacacatacactctcccaagactaaaccaggaagaagttgaatctctgaatagaccaataacaggagctgaaattgtggcaataatcaatagtttaccaaccaaaaagagtccaggaccagatggttcacagccgaattctaccagaggtacaaggaggaactggtaccattccttctgaaactattccaatcaatagaaaaagagggaatcctccctaactcattttatgaggccagcatcattctgataccaaagccgggcagagacacaaccaaaaaaagagaattttagaccaatatccttgatgaacattgatgcaaaaatcctcaataaaatactggcaaaccgaatccagcagcacatcaaaaagcttatccaccatgatcaagtgggcttcatccctgggatgcaaggcttggttcaatatacgcaaatcaataaaggtaatccagcatataaacagagccaaagacaaaaaccacatgattatctcaatagatgcagaaaaagcctttgacaaaattcaacaacccttcatgctaaaaactctcaataaattaggtattgatgggacgtatttcaaaataataagagctatctatgacaaacccacagccaatatcatactgaatgggcaaaaactggaagcattccctttgaaaactggcacaagacagggatgccctctctcaccgctcctattcaacatagtgttggaagttctggccagggcaatcaggcaggagaaggaaataaaaggtattcaattaggaaaagaggaagtcaaattgtccctgtttgcagacgacatgattgtttatctagaaaaccccattgtctcagcccaaaatctccttaagctgatacgcaacttcagcaaagtctcaggatacaaaatcaatgtacaaaaatcacaagcattcttatacaccaacaacagacaaacagagagccaaatcatgagtgaactcccattcacaattgcttcaaagagaataaaatacctaggaatccaacttacaagggatgtgaaggacctcttaaaggagaactacaaaccaactgctcaaggaaataaaagaggacacaaacaaatggaagaacattccatgctcatgggtaggaagaatcaatatcgtgaaaatggccatactgcccaaggtaatttacagattcaatgccatccccatcaagctaccaatgactttcttcacagaattggaaaaaactactttaaagttcatatggaaccaaaaaagagcccgcatcgccaagtcaatcctaagccaaaagaacgaagctggaggcatcacactacctgacttcaaactatactacaaggctacagtaaccgaaacagcatggtactggtaccaaaacagagatatagatcaatggaacagaacagagccctcagaaataacgccgcatacctacaactatctgatctttgacaaacctgagaaaaacaagcaatggggaaaggattccctatttaataaatggtgctgggaaaactggctagccatatgtagaaagctgaaactggatcccttccttacaccttatacaaaaatcaattcaagatggattaaagatttaaacgttagacctaaaaccataaaaaccctagaagaaaacctaggcattaccattcaggacataggcgtgggcaaggacttcacgtccaaaacaccaaaagcaatggcaacaaaagccaaaatggacaaatgggatctaattaaactaaagagcttctgcacagcaaaagaaactaccatcagagtgaacaggcaacctacaacatgggagaaaattttcgcaacctactcatctgacaaagggctaatatccagaatctacaatgaactcaaacaaatttacaagaaaaaaacaaacaaccccatcaaaaagtgggcaaaggacatgaacagacacttctcaaaagaagacatttatgcagccaaaaaacacatgaaaaaatgctcaccatcactggccatcagagaaatgcaaatcaaaaccactatgagatatcatctcacaccagttagaatggcgatcattaaaaagtcaggaaacaacaggtgctggagaggatgtggagaaataggaacacttttacactgttggtgggactgtaaactagttcaaccattgtggaagtcagtgtcgcaattcctcagggatctagaactagaaataccatttgacccagccatcccattactgggtatatacccaaaggactataaatcatgctgctataaagacacatgcacacgtatgtttattgcggcattattcacaatagcaaagacttggaaccaacccaaatgtccaacaatgatagactggattaagaaaatgtggcacatatacaccatggaatactatgcagccataaaaaatgatgagttcatgtcctttgtagggacatggatgaaactggaaaccatcattctcagtaaactatcgcaagaacaaaaaaccaaacaccgcatattctcactcataggtgggaattgaacaatggagatcacatggacacaggaaggggaatatcacactctggggactgtggtggggtggggggaggggggagggatagcattgggagatatacctaatgctagatgacgagttagtgggtgcagcgccagcatggcacatgtatacatatgtaactaagctgcacaatgtcacatgtaccctaaaacttaaagtataataaaaaaaaaaaaagatttgaatttgcaaatacaaaaaaaaaaaaaaaaggaaaaaaaaaaaggttgagttcatgtcctttgcagggccatggatgaagctggaggccatcatcctcagcaaactaacataggaccagaaacccaaacactcatgttctcactcataagtgggagctgaacaatgagaacacatggacacagggagggggacatcatacaccagggcctgtccaggggtggggtgaaaggggagggagagcattaggacaaatacctaatgcatgcggagttaaaacctagatgacgggttgatgggtgcagcaaaccaccaaggcacatgtatacctatgtaacaaacctgcatgctcagcacatgtatcccagaacttaaagtaaacaaagaaaaaaaaaaaaagctctgatttggacaccagtgagaatatgaagtccctcggcttgctggattttcttctgtctaggatcgaacctccactgctattactattttctttcctttttgattcttttggatcccatggaaaaatatttatctgcaacttctccacaaaatggaaatttgtttttaatcttatctaacaggagattcgcatatgaccaattcttatcttttaaataaaaatttacttatgtgcctgcctgaaaggactgaagatcatacctctacgctctcttccatgtcctttcttctctctcccctgacacagctgcattggaagtagctgtaaatgggatggactaattttccctacccaggaggcccactgtaaatcaagcggtcacccacttccagctaggcattttgccacaccagggctatgagaaacagatttaattttccaatcagcagttctgtgcatgtctgattcttggctcaacatacaactgctatgctgtttattatacttcatctctccatggcctctgaaactccccaaggctcgggttcgtcatccgcaaaatcgtgggaggctggttccatggttcttgcagtcccttcgctttgaatccttttgtctgtactcttgctacatgggtgttctctgggagtttgttagacatgcagaacctcaggtcccacccagatccagggaatcagaatctgcatgttaatgtgatccccaggtgactctcatgcatgttaccatctgagaagacctaccctccaccacactgaccacagccacgagctgtaccaagacaccaccacacaacagcctcggttatcccttcatgaaagaaaaacaaacataatggctgggcgtggtggctcacgcctgtaaccccagcactttgggaggccgaggtgggtggttcacttgaggtcaggagttcaagaccagcctggccaacatggtgaaacccgtctctactaaaaaaatacaaaaattagccaggcacggtggtgtgtgcctgtaatccccattattcaggaggctgaggcaggagaattgcttgaacccgggaggtggaggctgcagtgagccgagattgtgccaactgcacgccatcctgggcaacagagcaaggctctgtctcacaagccaaaaccaaaaacaaacaacaaacaaaaaaacaattctcaaaaacaaagcaaacaaagcaaggcatgagatgagtgtgagccaagaaacaatactgccaggggaatattgccaaaacaccagagtcatgccttgaagtttcttatcatcagggtcacatttctgaaccagaaagccacaggaaaggaaagactggtcacagacttccttcttccctggaccatttgttacgggaagttctcaggaaacaggtcagtaagtgtagagggcatcacaggacaaacttcattgctgggtttcccagaaaagagcagctctcccctactgaagacacttttagcagacgggccttcactagtgagtaaatatactaaagaagcatggacttacttgtaggtcggtggagcagctgatttgggagagaacccatgagatctttaaggacggtagggatgttctgattagcatatatgctacagccatctgcgatgccaaagccatactgtgatgggactatgccagttatgacaccttcataaccatgagaactgcactcatggccttttcatacccatctgctgatttgataaccacaataatcttccttagtgggatcactactcccactgacagttgaacaaactgacatccatcctgagaagtatacttaaaactagcaagtggcagaactgaaatctgaacccaagtatcccaattcctaatgcaaccttctcactgttccatgaaaagttccattttatagaggacatggctatattacttggattagaaactaatattaaagaagcatatcacgcctgtaatcccagcactttggaatcatgaggtcaggagatcgagagcatcctggctaacatggtgaaaccccatctttactgaaaatacaaaaaaaattagccagatgtggtggtggcactgtagtcccagctactcgggaggctgaggcaggagaatggtgtgaaccccggaggcggagcttgcagtgagccgagatcgcgccactgcactccagtctgggcaacagagtgagactccgtctcaaaaaaaaaaaaaaaaaaaaaaaaaaggaagcataaacccatctatcatcacaagcaccctctttttcatacatttcaaatttttgataggtttgaaaaagaatgaattcgacggtatcttttagaagccaggataaaagagattaaagcagtagtccaaggtcacggagattcctgatggtggagcagggctgaaaagctccctcttctagctaagtgaggcctgcctgtcactttgcttggacagcccattctcaatagcactttcctcccagaacactctcccaagtctttaggtttccctttctcaggatgaatacgatggctacgtgaatggccagaagtttcaccaactctaagtcaaattgtagtgtagcgacctaggcacttcaatggtcaagagagatacagccctgtatgacgcggccacattttccaacttggggaagaatttatacacatattatcacaaagtaaatgctgtaccacaaatccagtttttatcttgacctccagaaaattaggtcagttatttttagctacactatcaatcttgaaaatctcccagagttaaaactcagactacatgtctaaatcggggtttatttttgtttaaaaataacagtttcctggccacacatgtttaaatgaagcatgctttgtccccttatggtaacaaactgccctggaagggacacaaacaaagcttcacatcatttgtgaaaatattccttattgctagggacattttcctgaaatatcacttgtctggcttagactgagggtacagaagaagtcccttttcctttaaaacacatttccttttggctttcaaacatcatagatcaaagaacttagacctaccagtggcatcagtcagtaatcaagataaagaccagccaggctccctggcatctaaaagcagattgtagggctcctttttcccgtttacctgtagaacttgtgccaatgtgctgatctgatttccaactacattagggagtcttggtcctgcctgggttgtcaggaacttaaagtagagactaaaaaacaactttatggccaggcgcggtggctcacgcctgtaatcccagcattttgggaggctgaggtgggcggttcacgaggtcaggagatcgacaccatcctggctaacgaggtgaaatcgcgtctctactaaaaatacaaaaattagccgggcatggtgcaggcgcctgtagtcccagctactcaggaggctgaggcaggagaatggtgtgaacctgggaggcggagcttgcagcgagccaagattgtgccactgcactccagcctgggcgacagagcgagactccatctcaaaacaaacaaacaaacaaacaaacaaacaaaaaaaccaagtttatatactacagaaataatctctgaaagatgctgtattaagattacaacacacacacacaaacacacacacacatatcttcttgttttgaggaaacgtacagtgaagtatttaggtgtaaagggccattatgtctgcaacttcctttaaaaatttttaaatatatttttagaacttttctaagtctccaattatactaaaacaaaaagtttagtactgtaggcattgtcagctttaatttatacatatttggatgtcttcctctggttcgatttatagtgaaattacatcatatgcccattaatgtgatacaaactgcatgtcttctacaaacaaaaataaaaatagaagtgaatgtaattttgatgccttttttttttttttaactggagacagagtcttgctctgtcaccaggttggactgcagaggcgtaatctcggctcatggcaacctcggcctcctgagtagctgggattacaggcgcgcatcactacgcccggctagtttttgtatttttagtagagacagggtttcaccatgttggccgggatggtctcgatcttctaaccttgtgatccacccgcctcggcctcccaaagtgctgggattacaggcatgagccactgcacccggcctgatccctcatatcttttaaacataagtcaattatttcatatggtctttaagccaagaaacagctatctcttcactcttcacatgctggaggaaaaactggctgcctggctggttgagagatgtgtactttgatggctgacctgaagacatttcaaggtgattgttacgtgaaattctctcttcaaatctgacttgaagagtctaacctctgcagcatatgttatgacttcactgtgagtcttcttttattaataaaatataatgtttttactaattataagagtaacataaatttcatgccaaaaatgtagaaaaaaggaatgagaattcatttacaattctaacagcagaaataatcaagagtagtggtttttttttaatggttttattcttacagcattattttcgtctctttatcactttactatgcaatttttatgactatgcttaaggagagtaaatttttcgaagttattgaggcaatggagagtctttggaatgaggataattaggcctgaggacacagaggaatcatgaggaagaattctccagtttcattcctttttctgggtacagtttgtttctccttctaagtaagttcctagatatagaatgaattggaaaaaatgaaacgtgaggtttgctacgtctataacagtatcacatttcattttttaaaactgccaatgctttcagtgaggaccagaaagtacagtgagaaaaaaaaattcctcaaatattagttttcatgctcttgcacgcatttttataaaggcaaaagtcattctggtgcctgtatacaatctaaaggcataatctcctggagccttcagtgctggttttggggttttctggagatcaatccacagtgtcccattttttctgctggagctctgaacccactaagagagagcaagaagagatgtaaacctctcctttgcttctgataaagccaagcccttactagtccacatgatgctttctctggggagtgagtcacatacaggagacatggcttgtccagctgcgtgctggactgaatttcagctccaacctgaaccttccaacaggacaagggagggaggagaatgggccgtagcaagacttgcccacagcattgccataacagctgtgcaggctgtgggtacaactctaagagcagcactcattttgtagtttcagtgagtcgtgtccctaaagccgtgtcctgtgtgaccagccccgtctctcaagctcatgagagaagtctatctgaccgggataagaaggatcctggggcgggcccaagcaaatgaatgaattgggaaacagtgcccctcccggcagccagcaaaaactccgccatgctgtgaagaaagtgcattctaattgattcatgttgatacatgctgaattgatggaattttatacttcaaaggatgcaaagaattggttagcaagtctgatgagctcatggtagaaaggatgattttcaacatccatacatagtgaatttcattcaaagagcctaaaaagacttatgcagataattataaggggatcaggcaagtgtgtaatagcacaaattatatatatatatatatgtaaaatcacaacacaggattgggtccttttcccacagacagcacatcatccttgtatatatgatagctcatttgaaatgtttatttatgcagattttaaaaagcacacaaaccctgtaagcacttctgcacagtggcctactcgtgttttctttaacacaaaacttgctttctggtgaacaattctagatatagcaatggttctttctcctctgctttagcttattcacaagcttctttaacttctttaacaacgtgtggggaaaccaagcctggcaacagaaagcacttcacatggggggcttggaaatgaatggaaagcgtctgtcttcaggagagcattcacgatgcacaggagtgagagaagctgaaaagagtcactttaaaagaaataatctgcaaccaagaaaatcaaaccactttatcataaactagtgagcccctccctccctgcctgccttcctttttccaggggagtgctagaaataacttcatcaatttcttttcacttgaagggctcatggttcagaagaaaagatgggcataaaaataattactattacaagtgttatggtagggataccgacagaatgacaaagaaacaagcctgggctttagggatgtgactagtgatattacagtggggccccagggaaagagatcattgtcctagcagatacaagtgcatgtaccgaggcacagaggacaagctgcccaggatctgtgactcttctggctgctgtggtacaagggaagtgaaaagggaagcagcttagccaagaggctttcagtttgtgggatacagagggcagaggaatacactgacctataccatgagtatgcaattagcaaaatcccagcctatgggaattctacgggtcaagtgacctgcgcttcatgaacaggtaaactgtaaaaaaaggatggaggagaagcctggagattataaaagactaaccagacaagtcagcagtaaaaaatggccaaaagcatagccgataaggatgcacacaagagtgatacagccagaaagatatttcaggaactggcccaaggaaaaacagtgggcattttggtggcggtatttgggatagggcgagatgctatcggggtggaggataaacttctaattcttgacctgagtttaatctacgaaaagagaaaatatgggggagaaaggttctgtttacacatgttgagttgcaatctttcagaatattgggtggagccaatggaaacatggacccagagagctcacttctatgctgaaacagcccacagggaagcatcagaatgaaaatggaaacgttcccaatactagcagaactccacaggcgctttgaaaaaaacatccacattagattccccaaaagggatttatctggtaataaattctgctagacaatgaacagttccacccatgataaaataacatgttgttgctgcaaattctttgtattgtctaattgcagtgcttaacgtaataaaatcaggctggtgttattgttaagaactagagagtgaagcattttttatccaaataaagtgcaatgggttttaaatcaaatcattttagaataagaatcctatgagataataataaaatgcaacttcatcttttcctgccgagaacaaagaagaaaatagtgtaggagatgaaaagtaaagtagacccaacctttttgctaatttgtttttagatacgtactccatgcagacaatggtgaagtgaagtgaagtgaaggggtgtcatcttattcacctagagaaccacaaatcttggtgctggaaagtacgatccattcgacatgatggactatttcccacccggccactcactcgagaatggataacctgttttcccgcctggggtaactgctttccatggatgtacagcttcaggcctcatacgagaggatctcacaacaatctcttcaaactttttctaatccccacactttccagtcttggcacaagacctcatccaggcttctgagtctttgttgaaaatttacacaaaattctagaaatgtattttctttaagatagttactttaaaaatgttattttcatctcagcacagttagcctttccttatctgttcttaaaatgtttcaacttgaaactaaaaaagaaaaaaaaaaacacatttcatctcaaattatgatatactaaataattattgacttggccccaaacatttctactcttttcttcttacacaatcagatttaaaaatgtaactaccttttctaaacatacaatattaaagcatactcaacttcagtaacaggtaatgaatgtacctcaaaagtcagagcctctacgttaagtaccatagtgctccaacatcgttttttacatttttaaaattttattttttattgatacataatagatgtgcatattttcagattatatgagaaaacttaatatattcatataatttggaaagatcaaatcagtataatgggatatccatcacttaaatgtttttcttttctttttgctttgaggaagggtctctctctgtcactcaggctggagtgcagtgatgtgatcatagctcacttgaaccttgaactgctgggctcaagtgatcttctcacctcagcctccagagcagctgggtctacaggcatgcaccatcacacctggctaatttttaaatatttgttttgtagagatggggtctcactatgatgccctggctagtcttgaattgctggggtcaagtgattttcccacctcggccttcccaagtgctgggactataggtgtaagccatcgtgcccagcctgtcttctttacgctagaaactttcaaattaggttctcctagctatttttaaatatacagtagattactgtaaattagtcaccttgctgataattaaatactaggtcttgcttcttctatcaaactgtgtatttgtatccattaatgaacctccctttgtaagtatgatgtaagcaatccttacttggctacactataagcttcaacaacaaattaaaaaatgattcacattatagagcatttatacatgccttttcatcttccaagtgtggtaaacattaattaaccctggctaattaaaacagccacagttgacacatttactcattaatcagcctcaagcaaatgcaaagcattaaactctttcacgttttggtaccaattaaatgttattattttttttttaatgaagaggtcataaatttaagacatgtagttcttagatttaaatttgatagtggttgaaaaaatttgacaatagttcacattcttaaaagtcaaggaaaataaaaacataaccgcattatgggttgaattttcccccaaaatatatgttgaagtcctaatgcctacacctaagaatacagccttacttggaaacagggtctttgcagatataagatgaggtcacaatggagaagggtgggcccttaatcatattagagaagacacagaaacagagacatggggagtaacaccatgtgaagacagaggtggagattggaggggtgcatgtaccaaccaaaggaatatcaagggctggcagcagcactagagcaagcgaaaggcatgaaacagattctcccctagagctgtaagaggcagtgtggccctggcaacaccttgctttaggacttctaacctctagaataatgagataatgagagtatatttctgttggtttcggccatgcggtttgtggtaactggttccagcagccctaggaatctaatacactgcccatgtaagtgaatattagctatttgctgataagacaagaatttctggttataataaatatactggaatagaatgtggtttctttttttttgagatggagtctcgctccagtcaccaggctggaatgcagtagcgtgatctcggctcactgtaacctcttcctcccaggttcaagcaattctcctgcctcagcctcccgagtagctgagactacaggcgcccgcaaccatccccgactaatttttgtatttttagttgagacggggtttcaccatattggccaggctggtcttgaactcctgaccttgtgatccatctgcctcggtctcccaaagtgttgggattacaggcgtgagccacaacacccggccgaatgtggtttcttagtgagtcctttactcaaggctggaattaaacaaaggagatgaatcacgagctctatgataatagtctaatagtctaatctagccctcttaagtgcagagatgttttccctctgaacacccgtgtgtttcagctctgttcctcttccaatgcccttccacagggaacaaatcctttcttgaccaccaatggctgcatgacttatcctgagaagatcatggggattttggatgccaggtcaacccttacactcagcaaggaagtggaagggcctcagtttcaaacactttgtaaacacagaggttaggtcatttcctctccaataagccagaagctgagctgtccctggcagcaaactgtgtgtcaaatgcctggcgggtttcaggttttactaactccagagtgacgaaacatcaccacctctaatgccagaaagaagtcagctgttgtacctgtgtcacaactaaatttactgaagtcagggcagctgaagtaatctataaaacttagcatgtcaatttcaatttagcgttcacattcaacaaattgtgtatttaaaaaaaaatctccagtagtctaaaagttttcattttattcttgtgtaaaatctggaagactggaatagaatgttttatggtatgagtgtttagtagcaacattaggttaactgtgaccttttggctcaagacatgagaaaatatagctaacaatgcttggttatgggtttgtcacactatactttgttatactatccagcagtatccacctgctttaacagtgtggatacactaaaaactaatttaaaaaaatctgggctgggcgcggtggctcacacctgtaatcccaacactttgcgaggccgaggcgagtggattacaaggtcaggaattcgagaccagcccgatcaacatactgaaaccccgtctctactaaaaatacaaaaattagctgggtgtggtggtgcgcgcctataatcccagctactcaggaggctgaggcaggagaatcatttgaaaccgggaggcggaggctgtagtgagccgagatcgtgccactgcattccagcctgggcaacagagtgagactctgtctcaaaaaaaaaaaaaaaaaaaaaacctgtcaaatccctccatacaagtgtatgcacttcacataccaaggaggtctaggatttgaagttcatcaaggccgagtttaggctgccagaccacaacctcgttttaatgccttaggtgcagaaacaggagaaataataccttccatgcctcccctgactagctttaggataaagaagctgtgcactaaatagacagtagctgaggaacgatgaagaggatctacccaaagtatgaataagccaactgctatggatcgaactgtgtgcccctgaaaattcatgtatcaaagccctaaccctcaagggacctttggagatcagacctttaaagagataattaaggttaaatgaggtcatgggggtgtgactctgatccaataggacaggtgtccttataagaaaaggaggaggccgggtgcggggctcacgcctgtaatcccagaactttgggagggcaaggcaggtggatcacctgaggtcgagagttcgagaccagcctgaccaacatggagaaaccctgtctctactaaaaatacaaaattagccaggcatgcctgtaatctcagctactcgggaggctgaggcacgagaatcgcttgaacccaggaggtggaggttgcagtgagccaagatcgtgccattgcactccagcctgggcaacaagagcgaaactctgtctcaacaaaacaaaagaagaagaggaagagacacctctctttctctctgagaaagaccatgtgaggacatgatgcgtaggtggccatttgtaaatcaaggaagagaggcctcctcagaaaccgacctgctggtaccttgatcttggacttccagcctccagaagcatgagaaaaataatttctgttgttgaaggattcagtctgtggtattttggtattttgttatggcagccctagcagactaatgcatttatctagtcacactcagacaaaagaaagagcacaggtcagaatagctttttctagaggattctgttttctttctttcttcggcttctttttctttttttcctgaaggcaatagctgaatctgagagtaacaaggggctcaccagggatgtgcaaggaatttcttgtactgcccctttcatggaaatgacaaggaagtgatttatttcagatgtgactcagttcaggatttgaaagcacatgtgacaaatggtcaagtaaagaaaaagcttttctttttctttacttgaccatttgccacgcaagttcccaagttcttcctccctatcttgcttcattacaggcagtgggaaaaatccaaacagcttccccctgtgtctgggacatctccagctctgtggtgtatttactttgaaggaacaaaaaaggggatagtatatgacttccatcccaagtcactataggatatactttaagaaacaagggagtttaaattgctctgctgtataacctgcaaaattcatctcctactgcagaatagagtgagttgcttctcaggattcgcacctggagttggtattcagcacatgttttctttgtaacatttctgtcaattctctaaaaagaccacactttttgagctggcactaggctctctgacaatcttccaagacgaagcttttacagtccatcatttacaatgctgacaactccaggcacattttgtcaattttccctttcatctcttattaaaataaaataatatcactttggatttgaagagagcctaaatggataattctttaagcagaatgtcagtatcaatgatagaaagggaagaatctaagagggaggtaaatgttctataagtagagaagtaggttcacaatttctgaaacagcaaatcaaacagcaaatgggggaaagttatgaaaggcagaattttgtgactcaagcccatcttatgcttatacagttttttgtttttgtttgttttgagataaggtcgtccctctgtcacccagcctggagtgtagtggtgccgccaggcctcactgcaacctccaactcctgggctcaagtgatcctccaaccacagcctcctgactagctgggattacaggtgtgtacccctaaacccagcttattatttttttgactttttgtagaaacagggtctccccatgttgcccaggctggtcttaaactcctgggctcaaatgatcctcctgcctcagcctcccatagggctaggattacaggtgtgagccaccatgcctggccttttatactgtttattccctttagatacagttaatggacattaataagcagtttatgccaatcccttttcatagctaataagaagtcttatcttggataaataaaacctagccactaatgctgccacacccaaataaactctctatgcatctgaacttcttgaggttaataatgcttcattgtaatattttataaaatcaccactttggaagtgaacaccactagaaattcacatggccagtttatagatggggactgggggaagcagggaggatctctgcaatccagtagttaggctctgccagaatgtatttagagttgtctctaaatacattctgagtctctgcttcattttttttttcaatgaaaatgacaatgtctgtcatcccatgttcaagacaaatataacaagtttctaagaatccttatatttttgttattgcatataagcatgagttttaaaaacctctgaatgtttaaaggatcacctgggggaataagaaaaatgcagatctctgtaggtctgaggtagagcccaagaatctgtatttttaactagaattcctctaaattactgtgcttcacttggccccaattacacattaggagacaatgatttcaggatgacaatcagccttttccatccaaggacttaaagcagctaaaccgaagacaccgacaaataccagatacttttctcagtctactggctgatggcacaaaagtgcagaagtcacgtagggcagtatggaaagctcgagctaggactggagtcagcgagagacgctagcttcccctgttcgtggattccgaagcctcaagcccacattaacaaggccttagacgacagtaaacacccagactcaggctcctacagagggcccccagttctgctctaatatacctatttttctttaaataaaaaacatctgatttttgcaccccaggtatttaaagacacactttgatttctgaaaggcttttgaccacacatgaggaactccttgggccttgaccatttttagcactttcacagtttctgattttgatcaagccacttaatcacccaggattctgaatctgaaaaccaggagggtttaattccactttcatgttcccttgaggagctgttggcagcaggatgaaggcaggtccatacagaacatgggaaggaagccaggaagccagcttttcctttcacatcaaagagatctagaaagcaaaacctgtctcacatttgcatacaatattagacttacatatggatgccatgtctgtcaaaagacaggctaattagggcattagtttctttaatggttgcgatttagtaattcacaaatagtcccacttaatttttcatcctatacctaaaggatctacttcacacttgaagtttaagaaggcttctcccttaagatagaaagaaggcattcaagtatcaaaatactggtttcctgccaaaaaataagggatgagaaaaagcagacacttagcttatcaatcaaaatgctggcagggaaagactactggattaccaagttcattcccctagcctgcactgattcctctttttctctaaagtttcttattttttcagtttttctcatgatactgacattgccaaccagcagtctggaaactgttcaggttgattcttagcagaaaatcgaggggctctcctgttactgttaatatccttaaaacacttaaatttggttagtttgcttcaagcattctcagtatattacaaaaaaaaaaagtactcaagaatttctagactttattttgactgacatcagctaccctaatgaacaggaggggacaacagcaaggtatattaggagcatctccttcctttttaatcagaattatataggaattaagaactctaaggccacagtagagtatagtatcttggaagaagaaagcggagaatgtctgacattttcactgatcgtttaggctgatggcttaaaccatttccacccaagtttcttacaagttagcatttccagccaacattacctactgcaatttctctataatcttaagggtattgagcccccaaatgagagagagaaaagagatgtaaactaaacaggagtcagagaaggggaaactgagtctgttgcacatcatttaccctttaacatgattttaaaggtaataatgcttataaaaatattagtagtagtaagggatatcaggtgacaagcagaagtgcccctctccacagatatgccagtgtatctgtagaaatacggtgctaaaattagaaaagactgaacattttaatttattaggtagacccaaatagtctaaaaggtttcacccatatacttagcaatagtttatgaaagttccttttcacctatccttatcatgacaaggcataacagatttttaaaaaactaccaattggccataatttttaaaaaattacattttcattggtattaataataagaagttgttcaccttttaatctacaactaattatcagatatgcatgcattttttttctatgaattgcagctgttaaatttttgtgaattaatccaatgcatcaattcctttgggttttcaccttaaacatttttgtggcatacaatttgtataatgtgaatttagaagataatagcataggtgactggggtgctacaatggattctcacctatttattaactttttaatgagttgattagtctctaaatcagtaattcgcaaagtttagcatttatcaatgtcacctggacagcttgataaaatacagattgctcagccccatccctagctttgctgattcaggaggtcaggggtgggatcatggaatgtgcttttccaacaagttcccaggtgatgccaggcgatgctgatgttgctagactaaggaccacacttggagaaccacagctctgaaatattccctgggcatggtatttgcaatacatactttatacctaataatttgtttcaggacacacaaatgcacatgagatttgatacatactctcaaaaagctaacaatcagttaagtggtaattcactgacatgtacacatcaaagtaatgttagacacatgtaataggccaagattggggatgggcattataggcagatggaataacataaataaatgcatccagggctatggatataagatcagcctggctggcaaagtcagactcatgaaggagattaatgggaaaacctatctgttttgtctgtctcaggttattttgaggatcaagtgaaacttagaaacaataacaacaaaaaaagcaaagtctgtgatcaagaagaattactctgttgcaacaatataaactaagaaaaaaatacgcaaaattctctgctgccttgggagatgatctcatgatgtgtatcatttacttttaatatttttatttatttatttttgagacggagtctcgctctgtcgcccaggctggagtgcagtggcgtgatctcggctcactgcaaccttcgcctcccgggctcaagtgattctcctgcttcagcctcctgagtagctgggattataggcatgtgccgccatgcctgcctagttttttatttttagtagagatggggtttcaccatgttggtcaggctgctctcaaactcctgaccttgtgatctgtgcgcctcagcctcccaaagtgctgggattactggtgtgaccgaccgtgcctggccaatgtgtatgatttaatagccagcagcaacaggccactaacatgccatctgctaacaggggctctagctattaacatcaacagagctaaaaactcttatgtctgatcccttgcaaatggcgaagacctggctgagaattattatctcatgctttcagagaaaactttgcttgtcctgcactgaaaaatctggctgcaataatcacatggaagaaggtatgtttgttggcatggttcatgggctggcttatgacttctaagcagaagatacaaaataatataaaaatcctgcaacatgcacaatgtagctgatattcatgttctctttaaatatcttaacactgacttacatatttaagggtgtggagtctttgagcttgggaagcatcttattactgaggtacaaatgctaaaagagggacatttcttctatctaccgcattttcaatgaaaagatgctgaaggtgaataaacagctctgcaaacccagttttgtttaacttggcaacagcagtaagtaagtatcactggacacagagacactggaatagattcagtctttagtcttattcatcacgtctgaccttgggcatattacatggttttcctgagcctatgaaatcatgcggctgaacgagctgaaaactaagattctttcctttgctaataaatttcagcaaacgataggagtaagaacggctgtctaacgagactaccaaatgctacgagacgcagcaagcaatgtccctttacctaatggatacagcttcttaactgtttatccaaagtctccccaagcaaattctaaattattctaaattatttgagtaacaaagattgggcccttatacctgtgacgtgtctggcaatgacaaagaatgtggaacatgggaagcatttaatacatatttattgaagatcctgtgtccttatttcttcaatctccttgctattcacaatggcgaatgatatgaatatacatatatatatcctatcatggtaaatatatataacataaatcttactgttttaaccattttaagtgtaacgctcagggtattaagtatatttcacgatgctgtgcaatgtgatggacgatgcatcacggccatccatcttccccactgaactattttcaatattgccaaattgaacctctgtgccctttaaacactaactccacagtccctcatcctctcagcccctggcaatcagcattctactttctgtatctatgaatttactaccctaggtacctcatgtaagtaaagttccatataaaacactttacaaaatttgcatgtcatccttgtgcaggggccaggttaatctctttaatcattctaattttagtatatgtgctgctaaagcaagcatcatatatatacttctttttttttgagatggagtttcgctcttgttgcccaggctggactgcaatggcgcgatctcagctcaccacaacctctgcctcccaggttcaagcaattctcctgcctcagcctcctaagtagctgggattacaggcatgcaccaccacgcctggataattttgtatttttagtagagacggggtttctccatgttgaggctgatctcgaactcctgacctcaggtgatctgcccacctcggcctcccaaagtgctgggattacaggcgtgagcaccgcacccagcttttttttttttttctcttttgagatggagtctcgttctgttgccctggctagggtgaagtggcaggatctcagctcactacagcctctgcctcctaggttcaattctccaacctcagcctcccgagtagctgggattacaggcatgtgccaccatgcccggctaatttttttatttttagtagagacagggttttgccatgttggccaggctggtctcgaactcctgcctgactcggcctcccaaagtgctgggattacaggcgtgagccactgtgcccagtctatcacatatacacttgtgaaaacttctaagacttccttacaaataaaagtggtgactgagaactaagccatatacctagtgatatctcagtggtgatgataaagttagtttttatttgacaaaatctatttgctatcagaatactatacttaaaaatcataagctttaacaattaaatcgcatgtataaaaattttagagaacatgcagctatagcaacttcaatgctatacaggaagctgaagacataggtccacacctcagtatctgccctcaggggatgggcagacaaatttcaatgcccccccccaaccaaaagcaaagacacaaaaggcatgtacaagacaatacaagttgttgccaagcactgtttcaaagaaataagatttaactcatgcttttaggagcatatgtaaatacataataattatcaaaagacaaacacattaaacaggcttttttaaacgcactatctgaagtcaatgaatccatcaacaggagctgaaattaagtaacgccctggccttgaccctctgaccccgtttcatgctcgaagtccaaagcctcttcacaaatagtgtttaggtgcacaccaagtcaacattcctttggacacgtctcataacttggaaccggttaatagatggatccactatttttgatgagatattataactaaccttctatgatttactttctaaagcagcccatagtgcatacggcaggaaaactgttaactaataatggcacttactcagaaaatacatgcaaaatttgtttctgagttgaacaccaacaagcaaattaacatgtcttccaaactccgtctcacatgaaacaaactcatgtcattcccagttagtgtttgtggaaacatatttcaaaattaatctcaaaattcgggaaacatatttcaaaattaatctcaatttggattcatctccatactcagggtggcaaacatcactgatttttttcccctcctcttttaaaaaatgaaccttgaaggcagatgcttgtgaaaaacagaataaccagcccttgttccagtctaaaatcattggttgttcccaagactctacaaaaaaagcaggacacatctgctctagtgttccatgccaggaagtagttccacagccaccactgtggtctgacttcacttcccaatcattttaatttggatttctttttagattttgtttcaaattacagggccatacaaacgagctggtgagttgagaaaatagctttggaactgcattggatcatcaaaagaaacggcagactttggcgtgggagaccatgcctcaggctccatccatttggttgaggtgcccacacatgcacaaaaataaaagaatggcataaaaacagacaaaaactactgacatgtcagtcatcatggcttaaggaaaagctcacaaataatttctctggaatctcaccaaaatttggagtaaaagatgatagcatgctaaatcagttctcttgctacttctaaaatactaacgttcctgaatggggctcaaggtggaatcatttcgaggcaaatatcagttctagtagataaaagtgttgtttaaaacctcattaacattatatataaatattccccaaaatgatctacagatccaatgcaatccgcacttttttttttttttttttttttgcagaaatggtagtgggggcagggggtgaggaagatcttaaaattcatgttgtaatgcaagagactccggatactcaaagtaatattgaaaaagaagaacaaagataacggactcacacttgctgatttcaaaatttactacaaagctacaataatcaaaacagtgtggtactacagtaagcacaggcacacagatcaaagaaaagaactaagaattaagaaataaacccatattatctatggacaattgattttgtgtaatagtgccaagaccattcaatgggggaaataatagtctttttcttcctttttttgagacagggtcttgctctattgcccaggtggcgtgatcaaggctcactgcagcctcagccaccccaggctcaggagatcctcccaccacagcctcctgagtagctgggactacaaatagatgttatcatgcctggataatttttttgtagaaatgtggtcttgccatgtttcccattctggtcttgaacttctgggctcaagtcatctgcccaccttggcctcccaaaatgctggaattacaggcatgagccactgcacctggcaagaatagtctttttcaacaaatggtgctgggacactggatatttatatgcaaaagaataaagtcaaacctctacctcacaccatatatgaaaattaaaatgaatcaaagatttaactgtaagagctaaaactacaaaactcttagaaggtaacaggtataaatcgttgtaaccttgtttcggacaatggtttcctagataccataccatagtaactgccacaaaagaaaaaactgataaaatagacttctaaattgaaaatttttgtgtgtcaaaaggatcctattaaggaagtgaaaatacaacctacagaatgggtaaaatatttccaaataatgtatttgataagaatttaatagtatccagaatatataaaaattcttacaactcaataataacagcaggccgagtgcagtggctcacgcctgtaatcctagcactttggaaggccgaggtgggcaggttgcctgagctcaggagtttgagaccagcctgggaaacatggtaaaaccctgtctctactaaaaatacaaaaattagctggatgtggtggcatgtgcctgtaatcccaactactggggaggctgaggcacgagaatcgcttgaatccgtaaggcggaggttgcagtgaactgagatcatgccgcttcacttcagcccgggtgacagagcgggactctgtctccaaaaataaaaataaaaataaaaataaaaataaaattaagaaagtaaggtaaacaacccaattaaaaaattgggcaaagaatctgaacgtacatcatttatttgaactgaacaaaataatccataacaaaccattgcaatcgcatgaagaaaacactgtggttgatatttaattcctcaaatttctgccagcgtccatttggagcacaataaacaagatcaatatactgcactgaattatacatattaaggtcaacaatttgtctgccagaatggtagagagcgcaatatttttttaaaaaaggaaactttttttacattcattattcctagaaagtgtattctttttaatgtagctaaaaggatttactttttcctaaaattatggagtagaaatacataaaagaaagtatctgtttgccaatggtaaaactataaaaatcattcaggaaaacggatgctgtattacatgtgaatttttaaaggtcattatcaatgacttccacagatcatctggatgacatatgcactatatttacagattccataattaagctccaaagcaagaaaaagagagcttacctaatatcacaaccaaaaaaggcatagagagctaaacgtatacaaagcactctactaaccaccactatggggtgagttcgacacctgcaggtctgtaacctcaagtctgcagacagaccagttggggacctaaggtatgaagtgtactggcattcacacatttgtatcttgctgtgtggagacatttcaacatggcagtccaaatgtcagaaaactaggaggctgtcttaatagtataccgtactttgccattcatttgacaaagcattttcatttataaatgagtggttctattttgaaagagaaattgtcttgggtcaaagatatacatttagacacaggcagctaaacttacaggcctcatgtctgttacttaataacactagggaaaatatgaataaggagctctgagactattatgaaaccaatgggggaacaaggctttggttgttgataatatgtataaatgttcttggccagatgtgggggctcacgcctgtattcccagcattttggggggccaagatgggcagaccacctgagatcaggagttcgagaccagcttggccaacatggtgaaaccctgtctctactaaaaatacaaaaaaattagccaggtgtggtggcacacgtctgtagtctcagctacttgggaggctgaggcaggagaatcacttgaacccgggaggcggaggttgcagtgagccgagatcacgccactgcactccagcctgggtgactgagcaagactccatctcaaaaaaaaaaaaaaaaaaaaagttcttatgtccaaatacttaagtcagctgtaaaccattaaatctatatacatttaaaagtcatttcttatgaaaaacaaagtcacacctatgttcttataagaacaaagtgacagctctctatttgctgttatgattttttttttttgatgttcatccttgactaacaattacacataaggatacttgaaattctcaataacattaaatttctattttgttgggctgggaagtgctataaatattctattttaaacctagtctactttggacccactaaacccccaaatcaacaggcttattagaaacagaatatggaaacactgtctttgaaataaccatgctgcatttttcctgaagagtggaacattttatcaagaggccacagtaaaattgtaataaaaaataagcatcctttcattattgcgaatttcttgattccccgccatatctttcaatcctgccccattcactatggatttattcagccagagatctttcccgcatctggtttataataattcatgtttttattaattttgaatgctagaagaaaaaaaatgggtatgaaacaattatgcctttgttccctctttatttcctactgcctttctcataaattggttattatagcattctgtaaaacagccatctctgaaaagagctacatttttagccttgaggtagctgcaaagagaagcacactttgataaataacctcagtgccaatacaaagagtagaatagaatccttttagcagagatttaaggaagattacaaaggacaaagaaaacaccaatcatttttaagtaacaatttgacaaagcaaaggttgaaaggatgaagggattctgcccttttgaaggattaataaataattaaagcagaatatgaacactgaagaggagccatagtttcactgaaataatgattccatcgtttgttgaatgaaaaaatattaatgaagacctacatagtgatttaaaagaggagattttatctctatacaaacaatgcctgaggccattctttgcaagaaatcttcataatctgcctgaaaataactttttaaaaaataaaaacattaataaatgactgagcctgggaacttgcacataataattaaaattgaatgaaaaaaatatgaaattataaaataaaacacgggccttttataacacaacaggacacttgaaaattcacacttatttgtcatgggaatagcttcagactgtggttggcggtcaaacaggacagcacaattaaatcaagtagatgaccaaatagcagagggtcatggtacaaagaaggaccatgttgtaaaattttattaataaaggtcctcagaaccctgatttatgctttgttatcttggccaaccacatccatttagttagcttgatcaatcacagctttagaggatgctgtggcctaggaaagaaatttgttttgtgtggtgcttacgctagatgtcaaggaaggagttttggtcaggtctttagggttacggaggagcccacttcatcagtccaagttaaggagcatctgcctttttatcctggggactggcttcaaccttatatttataattactaatatctaaaaagtaccagggtccttgctggatcttgaggaggcaaggatgaccaacatatatctggaagagttcacaggatggagggttagtagagatataaacaaataatttactccaagttagagtatggtattggaggtggatacccagtgctttcacattgaggttaagtaggggaaaattccacttcagagaggaaaataggcagcagaaagaacacagattttggacttctggcaggtcttggcttccaccccactttcatcactttactatctgggctgggcaagttggcaaactctcttaggttcaaagttcaatttcttcaactgtaaactggggatgctatcactgaatttccgagtatcttcactagcccatatgctgcctttgtgtgaaatgcaagaacagcccacttccagtgggtgtgcacaatgccagagggcttggctccttgagtgggatgtagaataaaattatcagtctccactcttaccctaaaccacctgccactgccacatctctatatggcggtcctgtacctcaacggggaacattcataaagaaagaatgtgaccatcagcattatcacaaagaggcactcattagttggttacatggttgtcactcaaatgccagctcttttctccgttctctatgcaaattagaaagggtttataggacttgggcattttacttgaatcttgaaaggtgcaacttttcaagcaaggaaaaaccacaagcagctttttttttttctttttttttttttttggagacggagttttgctcttgacgcccaggctggagtgcaatagtgcaatcttggctcactgcaacctctgcctcccgagttcaagtgattctcctgcctcagcctcctgagtaactgggaattacaggtgcctgccaccatgcctggctaatctttctatttttagtagagatggggtttcaccatgttggccacgctggtcttgaactcctgacctcaggtgatccactgccgccggcctgcagctgttttttttgttttgtcttttgtttttaagggaacttgcatagttccgaaaaggaggaattgaagtgggagggggccaatgtgagataagaggtagggtgactggctgggagtctaatgacactgatgagaggacaggatctcaggtaagtaggggatgtgcagagatttcacatgaacacagaaggccaaatatacagaacttgcaactaataagaaataatgggtgagggagaggaaggcatcatggatagtttaggccaaccaagagaactcagaatagagtgtgtaaaacaagtaaatttccagaaggacatgagtgttatacacattgattgcaggttcagaggcacatgggatatttggggtctggaatatggcactgggattcagtacgctggctgtggctagacccatgaatttgggattcactgaagttagtgggaaagtagcatgaacagacaggatgcctcagggaagcacaatggaagatacaaggccagggccagaactcacaagcatgatgaaccctatgctctggtcacagtttactgctcacaaatttaatgtcaattttccccttcaccgatagcattccttcttctcagcatgactccattcttcctcattttcacccataaaagagaattctaattggaagcataatttactgaagcagatatacctctcccactaaagatactggcagttccccagactggtgaaaacctcttatccataaagcaactgttaccattatttaattaaaccattgtatctctctacagatgtttgactgcattaagcacatcctaattgcttgtatttataagcacaaacttctatacaaaaggcatgcatttttagggactttaaaattttctccttttgccagtgtctctgaattttagtatgctatttgtactgaactgactccaaatctaaaatttgattatatacagaaatagcaaataaatgcaactcagactaatgacaaagcatttaatcagagaatattagaacgactacaagacataacctggaaaaaaaatctatgaagaacctatttagaaagtaagctaaaagcaacactttttattatgagaaattttaaacacatacaaaagtaaaaagaataacatgaggaacctctaataacatttggcttaagcaattagcacccctggccaatcttgaagtttcaactatattcctactaaaaagggacgtattgttttaaatgttccttcaaatgaaaaaggactatagatgacaactaggttcaacccagaaaagctattctccccagcaaaccacttctgtagctttgacactagcagctcagatagtgtacagggttcgttattgcaaacttctctttctatagagaacagtcatttaaaaatggaagcacccaggattccaaatgaaaggtttttaaaaaagattatctttcagaatgtggcatctggtatatttagaatgatatatatgtcattacttaaaaaaacccaactaatgggtggattgagagcatattacatacatacacacacacacacacacacacacacacacacacattaagagcacatacgtaatatgttctttatttttattatactttaagtttgagggtacatgtgcacaacgtgcaggtctgttacatatgtatacatgtgccatgttggtgtgctgcaccccctaatatgttcttaatccaacctaatggctgtttttttttttctttttacagaaaaagattccatgatactagttatctaaatatcctccctggtactgagatttgaagtttattgtgctgccctattcttgggcatttcgtaatattcaagatatctgaaccaccatctgttctgtggaagtgtgactaattagtggctaatgttttcagtagtatagtgccaaataaaaagttctaataatttaattataaagagtcaacaataattgctgggtgagggtggaatattggtcatcaactttttagtcctttgtaatggcttatttccctatagttattacctatgccacttcaactgaagtcacatgtgaaaacaggcttaagatagctgtaaaaaacaaacaaacaaacaaacaaaccatgttttctagaagattttagcttcagttcattaagactgataaattatttcattttgtaccttctacaactttttggagaacttctttacacttatttaatacatagtattttaaaggttccttactgatgtctattctccaagtatacctgaaaagtatatttgtttgctaaagaaacttgatacagtgaaaaattaattggagatctctgttctcaattcatggtgtagactaaaaactccacctccactatcttcataaattcttgctcaacactgagttgctccttctgaacaaaagcttggcacactatgaagttgctttttttctcttcttttttaaattagagagggggtttcaccatgttggccaggctggtttcgaactcctggcctcaggtgatctgctcaccttggcctcccaaagttctgggacactgcacctccctgacatatgaagtttcttctgcaagttatgtagctcaaagtataatttcagattccgtccattaatgtgcagtactgaacagaacatcatcacttgacacatgccaaatatttcacagcaatacaaacaatatttacaaggccacataaatcaggaaagaatgagcagaataacactggcataaaatgggaaaaagtgagggccagctgttcccttgagcggtgtttcaggcacttcaaagtcggacttactgtaatgggtacatccatctacaacatcctgggtgctctgattccagatgataacctgtatctatttccaacccaattaacaaagggtaggattctttatggggaaggatatgccagatacatattgcttatatgttggtagactacacactaaatctccagtataggtacatatgcttatattgaaagatgcaccaacataatcgtcatctatgtacctttgtgaagtaagttaaacagttatgggcattttggcagctgacagagactcatgtggtattttattctctttccaagagaaacagaaatgagagatcttaaatgaaatcattagtcattaggaaaactagggacataaaagacagtgggcacacaaggtcagtttcctggttttgataatggactatagttacgtaagatgtcactggtgaggcatgtgggtgatggatgcatgagacctctctgtactatttttccaagttcttgtgagagtacaattatttcagaatataagtttaatagcccactatcttttaagtttaaacaatgatgtggttcagagaacactcatggcttccctgctcagccatcaaagagaattgtgacttactgaatataacaataacctcaaagtcacaagtcacagttatgtgttttggctgtgctacttataatgcatgtgacacaggccagtaagttactcaaattttaagtttgagctttttcatttgtaagatggaacaatcgtgacactcaaaagatgaagaatgagtttttttccccattaattgtaaagtaccaaagcatcataatttgagagccataacaagattgggcaaattagaaaaaatgctgccacgtataattcaataacaagtgtccaattattacaaaactataccctaagtcaggcgacattcctccagtcttacaagtatggagaggtaagaactgattcaattgctaaggctagtaagctagttccagcctgacagtttcatcgtaaaaggcaagctgttctattaacttccatattcctcaaacagataactcacttcctcaattttcctctgggggaaaatacatgtccatgtgcagcatcaaaagaacagcttacttaccaacttcatcctgaatctcctcggccactgcaggcacgttgtagagcagggagagagactgattcatgcgctcataaatcacacggaggtgtgtcataacctgcatcaaaggatgacaactccaggtcaacaatgtctgggggtaggaatggttctttttctttctttttttcttttttttttgagacggagtctcgctctgtcgcccaggttatttttcttaccaagcactgcaggtagatacaaacttccaaaagaaaactgacaaaacactgctactgttaaaaaggttgaactgaaagggcaactttatttttcttgttctcctatttctgttctctaactttttgagctcaggtttaagacttgatcttgaaacttaccattatcttgtatgcttataacagccaattaaaaaggctacctctgccacctctgattcctaatactgaggctctcttaacaggaccctcatgcctaaatacatttctttgcaaatttccccctagaaaacaacgtatttcaatttgattggctatttcatgctatatatatttaactctttcattcaagaaaatgtaaaatttcacatttcctaaggtagatcccagttttcagcctttgggaaccggggagtataaaatacattattactgggcttcatttaggctcacatgaaatctcaacattccagtaggtttatgattgcctgccatacttcagttgaaccagttttcaagattttagtttatacaacttttgtttttctcattttagtcattggttttaatcagttccttagcaatcagttagcagtagactaagatttttacatttgttattttcataactcagaaaatgccaaaccacatattgctctaagacaagcttttagaatttaccagaagttaaagagctcttgccatagggaaaacacctataggtgctcggagaatgcgtgggatcctgtcaccaacccaagaagcaagaatcctggattgtcaaagctgcagaagatgattataccccacgcttacctgggaccggatctgagcggctttcttgggatccaccatgcgcacatgctcgaaatgctttagggtgtgctgtctgtccttctgttctgcgcggacatacttctttagcatattgaacacgtgacgaggctgtgggaggaaaatgaaaaactctttttcaagtttgtgcaaaacactgcttcttccattggcgatgggttagaggttccactaatgcatccggtcatgtgaacgtactgtgagtcacctttttgcaggtctgccttctaaacatttctcctactcctttcttaatgggtaattacttagatcggctgcttttcacttccacaagagcatttaacattctcgacatatatgatgactgtcctccttactcaacattttctttttaaataggagtactctgctatagaaagagaacagatttgaggtctgtcaggttaagttaggtccttctcttttcgcacccaaggggcatatgtgagactacattgctacgtgtacattttgaagaccagaggtaatgtcacacagataatcccatcaccagtaacatgtaacatacgaaatcaaaatgagaaaaacaggaaatttaaccactattttgtaagccaaggagtaactgaactgtaagagacattatatttttctaggagaaaggccattgctaaactgtatttattttactctgaaatttaattaagttctttctaagctatcagattctaattctttcagcaacaattacatttcgtcttaagtgctcctattttctttctaattggttccatttcatttttattttagttttacctgaaaacatccatcctaataaaaactaaggacaaagattccctggtcttcaacaatttcatcactatatgcattccactacatgattttgtaagatgatttccaaaaacacaacatttcttcttcattaaaacaaacaaacaaaaaaaccagttgtgaaaattcatgttgggaatagaattttggtcatttgggcaaacctagctattattaacccatgtgtcatgagtaccctgaaaaccagttggaaggtacaaaatttattccagagatggtgtgtgtggtggtggggcgggtggtaatggagcttttgttgtgttatccatatcctatgggatgtgcctctccttccccttttgcttagttaacttaggagccatctccctgccatctcaggtggaacgaggtaccctttttctgtgctcctatgaaatactgtgcaaatccccattaatgtacctaactcattaaattatctatgattcttactcccctctttaatgtgagatccacagggctggatttggtcttttttctttatttggaaccccaataacacagtgcttgacccagagggtgctctgtatttgcttggtgaatgcctgccacagaggccatgctactgtacttgagaaaacaaatacatatacacaataaaaataaaacaacttgggctcatctgccttcttttttcctaaaagaaatgtgcttctctataatccccagaaagacagccatcacagcttgcaacagttcttggcaacttattacaactctcatctgaactgtgaaatctggttgaatttacaaatcagaggatgaccttttaaatctcagaagaaaagtagtaaaagaggtaatgactgataagctatatctctatatattgaaaagaggataggttatacatgtgaattaaaaaaaaagaacatttgaaaacatcagagattaaaggctgactcttgttgattgtgaaggatatttgatatgcagagttgtgtgatcaggatcttgcacaaccaccctcgatgcttgcttgttattaagcaccaaggtcttagaaatctctctagttctgttaccattattcatccaagactggagacagaaggggctgtgactaatcgcatttaaccatgatgttccttcctggccttcatggatgctttcttagttgctctatttcatttttctcccttgtaaaggatttattgttttgaagaaaatgggatgaatttttaagagtttaaataagaaaaaaaaaaagcacttcaattaaaaaagtaaggattgctttgggagtctgaggcaggaggatcacttgcagccaagagtttgagaccagcctggacaacattacaagaacctgtctctacaagaaaattttaaaaattagctaggtgcagtgacacatgcctgcagttccagctacttgggaagcttggtcaggaggattatttgaacccaggaggttgaggctgtagtgagccctgattgcacgactgtactcaagcctgggaaagagaataactgcctgtcttttaattaaaaaaaacaaaaaacaaaaaacaaaaacagtaagaattgcttttcatcataacttctttttttccagttagtcatctatgaatgtttttgtaagatattttgtcctaaaaggactgtcaccaacaagcaggtacaccaggatgccatggccccaggctggccttggcattactacttcaagctaaatttcaatttagagaagatgcaggtcatttctgatgaccaacatctggatctccccttttcttctcctatcacaacaaacagcatatattcccactaattattattattattattctttgagatggaatctcgccctgtctcccaggctggagtgcagtggcgtgatcttggctcactgcaacctccgcctcctgggttcaagtgattctcctgcctcagtctcctgagtagctgggactacaggcacgtgccaccatgctcagctaatttttttgtatttttagtagagacggggtttcgccatgttagccaggatggtctccatctcctgacctcgtgatctgcccgccttggcctcccaaagtgctaggattacaggcgtgcgaccagtgcacggccaattaattattcatgttaacatacatttaaaaataagcacaaaagccttgacttttcccacctatgcaattcagatggcagtatctttcagatagtatttgcagattaaatgtgttcagtgatagttacccagaatgatgcgtagtccattgctgatactcaatacacatttatttctttcactcaggccttatctataaatcatcgacccctttctttcctctaagtaataagagttcaatgtgtattgactgcttctgaatgagacagtatattaaatgctttttgctggtaactcatcaaatcttcgtctcagccctatgacagagtcatagcagctctccccaccttattggtgaggcatgaagcacaaaggagattgtggttacataggctacatccctggcccaatggttacacagctagttagtgttagatttgaagaatgggttagtctcactgtcttggctccagagcctccttctcctaatcactttgtgatctggcccttcaaggagaatctaaaatagaccaagtttaagatagttctacaaagcaacttacgaagttaaaaacaggccaggcgccgtggctcacgcctgtaatcccagcactttgggaggccgaggcgggcaggtcacgaggtcaggagttccagaccagcctggccaacatggtgaaaccccatctctactaaaaatacaaaaattagcaaggcatggtggtgggcgcctgtagtcccagctactcgggaggctgaggcaggagaattgtttgaacctgggaggcggagcttgcagtgacctgagattccaccactgcactacagcctgggcgacaggacgagactccgtctcaaaaacaaacaaacaaaaacaaagttaaaaacaaagaaataagtgcatggttagaaaagacagtctgttccaggagtacttgcctgactttctagtttttacaagtgcaggtaatattctgtgggccatgctaacatcagctcctttaattgtgcagaaggttcagatttagcttgttcagtctctcaattactgtcctaggtttctggagttccattattccttagctaatgcatgaaattatttagctaattattaagctaatgtgtggggagaagaaagagcaagataggaatgtcctctatccatgtggataaaggattaggattactggaaagtgattcaaggtattaaagttaggcttttgtgacattcatggtttctagtgctaaattcatccttatcttctattgagatgggtaattaaatggtgaatgtattcacatgttttcaattgctgatctcatttaatactgccattctccttcaaaatatattcctaacttatcctgaaaatccccagagtttgataataatgttcccggactgaactgagggttgggctactatacctcacagcccaataacgagatgcagatgaactgggaggaagagagtttttatttttgtaaccttttacagggagatggcctggaaattagtgccagaccaactcaaaattacaaagtttccagaacttatatgccttctaagctgtatgtctacgtgtaagtgtgcattcatctcatgacagaagtgattaacttctttaatccataactaaggtctgagtcctgaagaccttcctctggagtctcagtaaatttacttaatctaaatgggtctaggtgctggggtgattactcttatcttgtctcctgctaaatcagggaggtttgaggagttcctgcagacctccagtaaacttgttcttggaggcctgtagagtttcttcagactcccagtaaaacttgttaatcctaaatgggtcctgttaagaattccttggttttgccaggaaaggcctaggcaaaactcttggtgggcttttgttacattccagcctctgtataagggcgctggcttttttttagcttttagtatttaactgaaccactcagtcagtacggaaacagctgttacggaggcctgcattagtgagatttggcctgccacaataacagagtagcaaaggaggctctgaggactccccaggcctcagctcctccagggataatgagacctgggaaaccccttcactgtttatgtaagctgagatgcgcattttgtgtgcatctacataaacacaagccttttcttcctaatgcctattggataagcaaagcctgggaacatcagataattcaggaagaccttaggatatctcccaataaatgaatttgcagggttctgcttcattgatttggccacctaaacacatctctaggaatcatgcttggaaatgaaaacaaaatcagattaccttctttgttggacggtaggcaaataaatcataccaaataaaatggtagttatctctatccctcagaaacaaatactatttttagttaagaaagaaaaaacacaggtgtaaaaagaaaataattcttggggcccccaaatcactaagctaaagggaaaagtctagctgggaactgcttagagccaatcaccctgattgtctaccctggagaggctaatcagaaactcaaaagaatgcaactgttcatctcacctatctctgacctagaaggcccctccccacttcgagtcttcctgctttttgtttcaagctgtctcgcctttccagaccaaaccaatgtacttcttatatgtattgactgatgcctcatgtctccctaaaaatgcataacactaagctgtgccccaaccactttgggcacatgtcatcaggacttcctgaggccgtgtcacaggtgcatcctcaaccagggcaaaataaactttctaaattaactgagacctgtctcagatttgctgggttcacatagataacagttccctatacttttatatttttgttgaggttaaaaaaaagacctccctccttttgatatatgattcctgcatatttcactcaaataaataaataattgccctcacaacttttggccaaaatacaaatcctccaggcttaacatttgttatttcttgagctataataatgtatctaagaataacaaggtgtcctgattgtctagtgaggtttattttattatgctaagacaaagatgaatttcttaaaattttaattaaaaacacagaaaccttcatacaggaatggtagggaaaaacccctctgttatctctatagaaacatattctcttaaagtaattgctattactattgtcacaatattcatacttaagacgggttattcatatgatcagaaaaacaaaagaattcagtggctcacgaaaaggatattgataaagagagtttaagaaacattttttttttttaacctgcaggcatataatccggatcaccctcatgtctttaaatcttctgttactagcaataatttttctgtgtattaatactacagtctggttatattggcattagatggctaatctcattattaaaatatatggcaaagaacagaggaagagatctgtcccaggaggactaattataccgaatcctatttattgtcactactgtttctgaaacagtgtttagctcataattatgtgctgtctgtttgcaactgatgtgacattttttaatttgtactaaactcacctcacaatcacactgccttttaaaaaatcattcaaaataatttattaaaggattaagaacaggcaccaccgaaatggcttagacatcatttacagcaagaggaaagagaaacataagatttacattttagaacattactcattttcctctctggaaacaagagcgtaatgtatttctacctctaggcacagttcctgccacaatttggttgctaataaatatttgttaattaaattaatgagtaacttgcagctagatacaatttcagaaataggcccagtagtgcagaatatccttcatagtcttcaagtagaaaacaaacacctctctactcagaatagtggccttcccaattttcaccgaaatactgacattaataaacctacttgatgtatctatatagtgtgcttgggtactttagaaagtagttttaactgggaactcttcccagaaaatatttaatggacttcatagcgtgcacaaactcgtctcaaagagaagattcatttcattaatttcaaaacatctcacatattgtgttcttatagtttgatgtcaaattgatgtaggtaatattgaagaaaatttaatggcctttcctgataaaagctaacacggttttggagatggagtctcactctgtcgcccaggctggagtgcagtggtgcacctccacctcaactcactgcaacctccacctcctgggttcaagcaattctcttgccccagcctcttgagttcagctgggattacaggcgtgcaccctcacaccgacctaatttttgtatttttagtagagaagggtttcactatgttggataggctggtctcaaactcctgacctcaggtgatccacctgcctcggcctcccaaagtgctgggattacaggcgtgagccaccgcccctggtgctagtacattttttattgatttccccatttcttagacgtatttactttttcatttttcttttatacgatttctcaaatttggtgttgctgggacttgggaaaagtctcatacatttgactaatggcaggatgactcaatgccagtcacgtctgaatatgtagcttattacttgacagttcacgtgggaagtgtattaaaattattaagtcctattgtcccactccacagctttatgcttgatctagaaatctggcatcttatcataatagacacttgtgccctaaacccgtttcttatggaaggcagtgaagtgtcaagagcgtttaaaagccctgggcataatcctgccaagaaggaagtaaatgactcactgtacgggaatcaccccaacctttccaggtcacagaaaaccctctcctggagcattaaattgcaccctggtggtttccaaaactgaacaaagcaattctctcctgctttcataaataggttcagaactattattttcacagttttacaccctggatttcaagaaatcttgagcatataaaatgtagaaaatttccgtgtgcaggtttaaaaatcacactttagagagttaagtctctctgtgcttgagatgatcttagttaaacgtaatatttggggaaactgccatggggacctctgaatcaccacctttattgtctttaatgccaggagttgagctgaatttttaaagtctcctgcaaaatttatccaccttcctttcttcagaaaggcaaacaaatgatctttgtagtttaaggtgagtataaaagggcaaatgataatcccatgccaaggtggacacagaagtcttgaatgaagcaatggagaaaatggcagtagattctcacactctccccctttggtgtttcttaagttttaacaatatggatccattagatggaaggatattgaacaactaatctctattaatccacttagttcataaggccagagcaaaacttttgtttatggccaaggagttatcccaatgttccttcccagggtatccggtttgctgatgcggctctgattttgtactgaacatgacgcaggagcatctaggagtcatctatcatctgttctctccttcccgtggaagcagatcacttcctcatagggatgtgtcaccaaagcctccatgtacttcctctaacaatctttctcctcttacggaggaagacatcttcctacttcacaattttgtctcaactttcaatgaatccttttgattttctaattatggctaacaaaagctaaaacaacagaaattgcagaaagaggagaaaaattaactccaatttgcagacggaataggaggaatccctttattaaatcacttgctcctagttacaggttataaagatggcaaacctgggaagtaaagacaagagtttatgttataaaaggtagaaaataggagtggttttaattctctcatcacttagtgaccttttttcttttcttttttttttttttttttctgagacggagtttcactcttgttatacaggctggagtacaatggggtgatctcccctcactgcaacccgggttcaagcgattctcctgcctcagcctcccgagtagctgggattacaggcatgcgccaccatgcccagctaattttgtatttttagtagagacagggtttctccatgttggtccggctggtcttgaactcccgacctcaggtgatccacccgccttggcctcccaaagtgctgggattacaggcatgagccaccacgcctggctgacctttttacaaatctggtaggtttcataaattttttccagggtattttgctagttctcagaaataatttattttggttgttcagaccacagtcataaattagtgaaggcagcatatagaactgaaatttagcacccaacacaaccccatgattcatgctttcagacaaactctagcacagaatggataaagagctaagatcttctgacctgggaatacagaaaggacagaaaatgtttggacttgtatgtcttcaagctttgtttagtcaaacagtgaaacatgtgtacacttaatgatgaacagaattagtaatacaacccagaaggcaaagcgcacagtgttgctgaaatcataagcaaaagatatgttcgactaactcggacccttgcagagatttgtcaaacggtctgatcatccgaaaaatgccaactgtgacatattcttgactttttaagagagatttacagcaatctgctttaattttgcatattcatacttggactatggtggtcctgcttcatacatcctctaactggttagcctattcaaagaaaagtacatttgcatttcttttaattttaccctctcctcttcccatacctaggcagtgttatgacctattagaaattctgagttttttgttgatattaaaacatttatataaggaaactcaaggtgatgatacttaaaagccaaacatcacctggcatctttaaactggtatccatggtcaaccttcacaaaatgaatgaaccccttaaagcttatgcgagattgtgtttgcgtgtgtatgcgtacatgtttccagggtgaggattctttgctacccatctgttctctatcagtcataccaggcaggtgaataactactggatctttaaatgtgctatttgtctacaaaaactaaatatttatattttcataatacattttcattctcaaagataaaatgaacatatatattaacattaaaatacgtaggtttgctggaagaaagcagagcgtaaaaccatacggtgctatgggttttaatagcatcctgtgaagacctatttgcattctgaaggcagtgactgagcagtgctccactgtggagggaatctgggtgatgaatatggcctcagtggcaaaagacagcttttaagctaatgccttcccaacatacttcttaatgttctatgtaacttaattaaacccagaaaccactagtatctcttgttacatacttcccatttgtatgtagcaagattttatcgaacttggtaaacattcagaaggtagggaagtaatagtactgagtggctttactgaaagagcatgtataccattcagcatagtttataagattttgttcactaaatgctaattctctcattttccttcccattcactatctgttattgggtttgcccttaggagtgcccaagctaatgagtccccctttgctcaccaatgtatacagaactcaactaaaaataaacggatggtgaacaaataaataataaatatgtaagtatagagcaattatttacttttctgaaagatgatctttttggcctggcagtctttcaacttttaattccattctgattagcttcataaaattttggttaaattcaaaacctgctggtggaatgccttaaacattataatattcatctgtccacataccaagaactcagcaaataatttttaacttactatcagttacattgaggtacagatgtcccatatttgctttggagatatatgctatatacatatattttataagataatttcttttgcaacgaaaagtgatgggtagaaataattggtttgttgggtgaagggcaattagcggtatcatataaaagctcaagtttagtaccacaatttcttttttgctttagaaaagaaaggtacaccaacacccacattggttaaagtttggtttagttgtaatccacatcatatagtggcgaaaaatttatttatgaggtggtttaaaccttctcatgccatcacctgtttacctgtgacaaacctcccattaatgtctacccttgttatctccaatgacggctgtttcttgttgaacatttattgctcttctgctggaatttaccaaatagccttgagcaaaatctcaacttagtgatgaaaccgtgctctttaatgaagagtctcacagaattcatgttctatcaaagaattatgtgaagaagtttccagagatctcagcaaaatttaacatgtggctgaaccattcaaaaatgagaaaccaaagaaggatgccgatgctatagaaactgccaacattttttttttgctcaattaaactgatagcctgaatgtgaagcagcagatagaagcatgaaatgaatttcagtatggataagatggtttcaatcgttaagacactgaaaaaatccaaacaacacaactgggatagataaacagatgtacaggaaaatgtttcctaattctcacttccctttagaaaatgcagttgttgaagtcagaataataatcatgataactgtctgatgaaagatttagactaagtatctgtaaaaacaccaaaaatctcagaattacaaagaaagctttggctgtgtatcccttatctttaaaacagttcaagtcttacaaattagggggtgctaaggttttccaaacctaggcctacaatagaaagttgattgaaataaaaaatccctatctggcctttggtttaactgtacaggatcacattaagtctaatttctcttcaacagtcaggacatatcatcatcttctgtctatgaaggataagcagaacgctgagagttacaaggggaaaggctcagacagcatttagttcctgtttcatgaagctatgaatagtttgagtacgagccctgacaaagtaaaaagcaggaagtgcatgactgtagagggcaggttaagaaatgatgaatgcttagctttaagtatttaatctggtagcttgcaggcctccaaaggtggtagaagttaacctcctgtgctgcagttctggagaggcatttaattcttccagggggaaaaagtgctaactccttgattttccaaagaaagtctaaggaaagtaaaaaggtgaaggggttggtgtttagaagagtcactagccttcaacagagtaagagttttttctgagtgcaaagacacagctctgctcaacttttttttcccatggggaaaacaactattttaataattgtaatatttcaagtatttatctcattttttaacttttaattttggaacagcgtcttgctttgtcatccaggctggagtgcagtggcaccatcacagctcactgcagccttgacttcctggttcacactcacacctcagcctccagagtagctgcgactacaggcgcgcaccatcatgcctggctaattaaaaaaatctttttttttttttttttttgtagagatagggcctttctatgttgcctagggtggtctcaaattcctgggctcaagggatcctcccacctcagcctcccaaaatgctgggattacagctgtgagccaccacatctagcctaaagtatttattttaaatacatgtgcctatatatgtatgactctaaatatgagtcaaacaatgcatttttaggttgaccattcagtgtatttgcctataggtacataactaaatcagaaatttgaaacatacagtatactcagacacagggactcaggaaatgaaattcattagtagaacaaggaattctagctgcacaaaaacaacatctcataacacttccacgtttaggtttaaaaactgagtaaaagtatgatttaaatctgagcttcaaagaaactgaaaacaatccacattgttttggaatcccgtgtttgcaaagtctgagaatatacggtagaatttgttaagggttagacaggtaattattctaagtggtaacatctacagaatctatggaaacgacacttttgatttacttatattcaaataccatttactgaatacagttgtctgcattttccaggcacggtggttaagtatgagggagatctcagaaatatttatgtatgactcctattacaagatgtgatctttttcagacaaccaccagtaagctctggatttatgtcttcaagaggaaggtataaaagtcctcaagaaggcatttaattacgcctgcaatctcagcactttgggaggcggaggctggcggatcacgaggtcaggagatccagaccaacctggctaacacggtgaaagcccgtctctactaaaaatacaaaaaaaaaaaaacattagccaggcatggtggcgggtgcctgtagtcccagctacttgagaggctgaggctggagaatggtgtgaacccagaaggcggagcttgcagtgagccaagatcacgccactgcactccagcctgggcgacaaagcaagactctgtctcaaaaaaaaaaaaaaaaaaaaaaaaaagaaggtatttacaattttcttgtgcctgccaaagtgcagacctaagtgccaggtcaagccatacaacattaaaacttaaatgaacacctaaagatggtaacttaacaaaaatggcaagtaatgccccctagactccaggcctgtgaccacccagccacattttattacaaaggaaagatttaaaggtgagtcatggtggctcatgcctgtaatatcagcactttaaaaagccgaggtgaaaggatcgcttgaggccagaagttcaagactagcctgggtaacacagcgagaccctgtctttacaaaaattttttaaaaattagccacacatggtggagcttctgtagacccaactctcatgaggctgaggcaaaaggattgcttgagcccaggaggttggggctgcagtgagctacgactggaccactgcatgccagcctgggtgaaagagcaagaccctgaaaagaaaagaaaagaaaacaaaagaaaagaaaagaaaagagaaaagaaaagagaagattagagaagagaagaggggaggggaagagaaaaggaaaggaaaggaaaggaagggaagaaggaaggagggagggagggaaggaaggaaggcaggagagaaagagaaacagagaaagagagagagagagagaaaataaataaataaataaataaatccgagttaagaatttaacaggaatccttagatcaatcaacaacagtgatctgatttttgacagtaaaatatttcttcctaatccagtttttaatttttttttcaaatgaacatgttgcctaattccatatgaagcaatgcggaggcccacaataagcacgattacaaccactctaaaattatcccctttgataaaagatgacacttcggcaaacattcttgccactgcctttcctgtgatggctgatgagactaaactgagagtttaaatgtacatttgttaaagcctccattcagccctcagcttatttttagtcccatcaatgtccatttagcaaagatcttactttagagattggactttcagctggaacgcttcacaagtttctgctataaagattctggtctcagcacccaccagcctatccttctctggcaaatgatcacacggctcctctcctgaaagcgtgttctccaaaaaagagaggaaccaaggaacttttgttctgcagagatataaaaaaaaatttcctgacaagtgccttgctaagatagagaattttggcaaatagaaaatgaaaacgctaatatgaatattctttttcaaaagctctttgtttagagaggaagctcgttctagtgagaaggcaccacagtgactcgcggctctaccctctcccttcccagcagtgtcaccctgaaccagccgctccatctcccgaggttgcagtgatatcatcggtagaacagggtaaatagtatcttacgtcttggaagaatgccacgagctctttaacggctcctcatggctttctgtgcactgtaactttatccatagaaagaaaaatcaaaatggtgaggaaaatcggtgcaaatgggtgactttctggttaagttgcataaaatgcacaaacaattccagccaagattgagtgagaagaactggatttaccctcctgcctgaaccaccaataactggacaatatattcatatacaaacagcgtttcttttttttttttgagatggagtcttgctctgtcaccacactggagtgcagtggcacaatctcggctcactgcaacctctgcctcccaggttcaggtgattctcctgcctcagcctcctgagtagctgggactacaggtgtgcgccaccacacctggctaattttttgtatttttagtagagacggggttcaccatgttggccaggatggtcttgatctcttgacctcgtgatccgcccgccttggcctcccaaagtgctgggattacaggcgtgagccaccacacctggcataaacaacatttctgcaagacattagacatcaggtgaaggacactgattcctgaaaaggggaaacaaatgaggacttacagctgccaaactcatggccctgaatttccaggtcatggtttcaggtggggaaacccacacagagcctagaggactcgtggagtggaggacatgaagtgtgtggagagatcaaggtagttgtaattcacaggacagggtattggtgaggagagagttgctccaaaagagaatccagagatgtgcagagtgatccctgagaatatagctgagtaatgatgggtacatgcatgtgaaagaaactgaagccagggggaaaatcaccaaaaagaattagcattaacagtgcttggtgttcacacagggacaggaataatgcctcttcccacgagtcaggtgagaaaacttaacattcatggtagatgactgagaagggtcttgcctcactagtaaggaataactagtcctaggctgataactgcttctatcccacctaacaaatctaaaaatgcaaagctcaaaaggatcaaactgtttccaagtaactcaactatgtgacagaaaaaagctcaagaatattacaaaaacacctagcattcaacaggtttaaattcagcgtccgacatttaataaaaaattatgaggcataaaatgatacagggaaatgccacatgtaataataagcaatcaaaattgattcaaagttgacagagatgttagaattagcaaacatggatatttaaacagttttcatataataactgtattccataggttcaaaagttaagatacagacgatattatgggtgttgggggtagcccaggttaaatttctatatacaacaactacagtatgtgaggtgataagatgaaaaacggccagatggaattaagggcagactgaatgataccatggcatatcaaaattaaattgttaaaaaccagtgatatagagaaaactgtaaaaacagaaaaaaaagacatgttatttttagagaaataaagataaagatatcaacacaaataagacagcagagtatcatctttcaggcagtgaaagagaaacctcaatccagtattttttacccagcaaaaatatttttcaaaaccaaaggtataaaagggacatttttggtcaaagccaaacaaagatttcatcaccaacttatgtgcactcaaacttttttttttaaagagacaggatgccctttgtcacccagatgggagtacagtcatgcaatcacagctcactgcagtctcgaactcctgggttcaagtgatctcctatctcaacctcctgagttgctgggattgcaggtacaagccaccaagcccagtctctaagacattttaaaggaaatctctcaggcagaaggaaaatgataccagctggatctgcgcaaagagtttacagcacccaaaatgatgacttcatgggtaaacatgttgttttttttttaaatttacaactcattaaaaaataactgtttaaagaaaaacatcaacaatgtagtaaggaaaaagtatgacaacaaccgcttacagagagagagagagatgaaaaatggaagtacttttgtaaagtactgtctgtggagtggtataatatcatttgaactgacataacatcatcgtgacaagtttagaatgttttctataagcctaaagcaaccagtaaaataacaaactagttataacttataaacccacaaaggagataaaccagtaaaataacaaactagttgtaacttacaaaccaacaaaagagataaaatagaatcataaaaaatttctaattaatccaaaaaaaaaagaggaaaaaagaagaacaaggaacagactggacaaatagcaaacaaatatcaagatgacagattcagtgacaaccatatccataacctcattcagtgtacatggtcttcccaatccaaaggaaaacgcaagacccaattacatgctgcctacaaaaaatacacttcaaatataaagacaaacaaggtcaataagagtataaggatggaaaaatgcaccacattaatattaatcaaaagaaagctggaatagctttattaatattaaagtagattttggagcaaaacattacaaaggataaaaagatcatttcataagaagaggctcaaggagggcctaacagcctggaacatttacacgcctaaaaacacagcctcaaactatacaaaataaaaactgatagcactgtttagaaaaatggcccggtccacaatcacaggcagagctttcaatatcccttgctcaatgacaaacagaaagaacaaatggctgggcatggtggttcacgcctgtaatcccagcactgtgggaggccgaggtgggtggatcacctgaggtcaggagttcgagatcagcctggccaacatgttgaaaccctgtctctactaaaatacaaaaattagctgggtgtcgtggctcacctgtaatcctaggtacttgggaggctgaggcatgagaattgcttaaacccaggagacagaagttgcagtgagctgagattgcaccactgcactccagcctgggtgacagagtgagactccatctcatttaaaaaaaaaaaaaaaaaaaaagaacaagtggacataagttacacactcatgctcagaaagttccttccattccaagtaagctctcccacagaatgccggtgaacacatctatgcctgtaccactcaacatgcctttttggggcaatgatcactgaaaaccatgaataagtctcatcattgctaatgtcatgactgacaaatgcttccccacagagaatatggccactgctctgagatggaaatttgagttctaattctttctggtccactaaaaattcttacaactcagccaaatctcaactttccttgaccttagttatattattatacttacatgatgagggggctgggcaaggttacttctaaaatcctttgccatggtctgaatgtttgtgtctctcccacccccaattcatatgttgaaacctaagccacagtgtgatgctatttgagggtgaaagctttgggagacaattaggcatgagggcagagccttcaagattgacattagtacccttataaaagagggcccagagagctctcttgcccattccaccatatgaggatacagcaaaatacaaacaaaaacaaaaataaaataaataaaagataaacaaaatttaagttctatgaaccaggaagcaaactttcaccagacaaccaagtatgctgatgtcttgatcttggacttctcagcctctgcaactgtgagaaataaacttctgttgctgataaggtacccagtctatggtattctgttacagcagcctgaagggactggaagacatccttccagcttttgtgttcgaacttgaactatgccatcaattgtcaccacctcaggaatattaaatcaagtcagggcttgcaatgtgagtccctgggagtcctgtctggctgctctgtggggaagtgtgagtacctgctgtgtagagatgaccttgtggaggtagctgccctgtgaccctttgaccttcaagatggaatggacaggggttgaacctctgaataacagtgctcaaggcatttctcctcattctttttgtatggcttccagttcccagtgccccacccttactgtctgtgctgtgacctgaagtgtgaactcggctgcagcgagacctacccgaggaggaacagcctgcagagcggtgatgtagttctccagggccaggcggcggcggtcattgagcatggcttccactctggccatgtgtgtctccaccagctgctgtctctcgttggctgcttcctgttccaaagattccactttctcctggaaatgctgccatcataaacacatatgtccatggggactgaataagtaggatgaagcagcaatttcaagtcttctaaaaaagacatcctattccattttcttctagtgctaaaaagtatcctaaagactgcatagtcattccaacattgactaattctacgttttatagcttacttcactttcttgcactctccaaccctcatcaaacctactttctcattgaaaatcagtatttcataggctctctgaaggctgatttgactaataactttggataaatatatgcactcttgaaactcttatattacatattaaaaaaaaatccctctcttactaacagtacctcaagtaattgaccataataaactgttggtttacttaaggtaattttgagactggtttccatcaaaaattcaaattctcataatttttgctggagggagaagcagcagaagattgtggtgactgaaaagatgtattattaataaaaagtagattgcaagttacaatgtgagttttatggcaatgaattataacttgaaataattgggagcaaatataaggcaggatttaaacaactcaattactagacaatgattaagaacagctgaagttcatgggactatgaacaatcacacgtgaggtgctggcagataaaggtaaacctgcagacactcattaaaaagactgctggcatgtgatgtttggtaggaaatgggttcaggttttacctggataactgccttcttatcagctttaggcaagttctttgcttgacgttctgcctcttcccattctctcatgacctataaattaaggaaacatttgaatttaaaatcatcagttcatcctttgaatacagacttaataggatggatgattatgtttttcctctatttttgtcattttagatatttaaaaaatttattacataccccttcctatctgaagaatatttgacctcccactaggatataaataattaatcacagcagtatattaaacataaatgttcatatttattgcaggaatatagctttttgagtcaaggttggtctttttttaccccgagaactgacagtcatttgatttgatgtgaacaaataccaactattcatggaaggcacacattaactgaacaaggtcttccaatattaaactgaacacctaagttttactctcttatgaaagcaactgaaaccattttaaactgtatattttgactttaaagaaaatatgacattttatgtgtgtgtgtgtcatgaatacaatgccaaaaagcagtacataatgggggaagaaaaagaagacttctgctgtctaatatcctaagacctatccccctttaaagaactgatggggaattaaggccctttgagcttgccaacctaagtcatgaacagcaaggattacgctaagtccttccaaaaactccaagaaaacatgtaatattctgaatgcagcaaacatgtatttttttacaagtagcactaatttagtaaccaactgctatggtttgaatgtaacccctaaaaagcatgtgttggaaacttaatccccagtgcaacaatgttgaggggtaagtcctgtaagaggtgattcagtctctgtcctcatgagtaaattagtatcattatggggggagtgggtttgttattgtgagaagtgggttgttataaaactcagttttgccctcctcttgcccttcttccttccaccatatatgatacagcaaggaagtcctcaacagatgccagcaccatgttcttggacttccccacctgcaaaactgagagccgaattttaaacttctttttctttacagattatccaggctggggtattctattatagcaacacaaactgactaagatatcaggtgaatgtgttttgtaggaaatcaatgcttcctgctctcaactttgatgttcacctggatttccctgagagaagttcactcattaacctgatacaaaaagtaaaagtctgcacctctgtatgttgttcaaagaaaatattaacttcctaccacctacagctgccttttcaagtgtatgacaagtagaatttgtttgaagtgcaactctgaactaggtaaaatgaagaaagatcaaggaaacaaaatattggtttggtgccagatgtgtacttgcatactctgtgtactcccaaagcatgagaaaacttgattactgtattataagagcctgttttttgtaggtacttagccttaaggaatagactcttctaacatacttcaagatgggaaagaaaaagaggcttggaataaataactatagatagaagacttctatgagacaatactatatcaaatcaccatgtgggttcctaattacagattttattgtccattggcattcattctttgtatatgataggcaattagcttcttcttgttgtttttgtaaaaccatggaggaaacaagatggaataaatatttcattacacttgaaaagcatatcaaaaataatctcaaggttcacagcaaaattgggacaaatgccctgctgcaatgaacaagaatagaacatggaagaaaagaaacatattgtcccatctgctttggtgcttctaccaagttaataaagggaacctgtgggcaagggggaaatggaagaccatctttgctttatagatgagataagccttgcaatataaatatttcaatttcctgctttgggaatgttcacagtggtggtactctaccaacaattcttcaagcaaggaatctcaaaattagtttgagatagaagttcaatgttctactgcaatgtgagaactgatttcccatattacatttacattttttccattttacctcatacactttaagaaactggactttaagctttaagctgggggaatccatgaaataattaaagagatttatttagctaatgagttgcaaataagcattactatagaaattaactcacattttgattttcagaacaatttaacaatatcctatacccccacaaataaacaaatcacctgcaccatcccactaagactctactgcaaatgaatacacactatatgtaggctgaccatctccctgtgaacagtgaatttcactgtgggactgataacaagtagcattactgctgaccctgtattaagagctttacaaaatctatctaatttaattgattcctcacaacagcttgtgagattagccagggccatcccattttacgaaccaggttaaggtaccagctcgaggctatgcaggtaaaaaagggagagggaagaatataaaccaagatctctgtggctctaaagatcatgtttttgtaccctgtggtacccaattttttattataaaataaaaaattcattaggtgagctaagtttatttatatttagtgacaggagaaaggggcgctcttaaaatgttgctgcttatcttaaaaataaaaacctaggccaggcacagtggctcatgcctataatcccagcactttgggaggcccaggcgggtggatcacaaggtcaggagatcgagaccatcctggccaacatggtgaaaccctgtctctactaaaaatacaaaaattagctcggcgtggtggcacgtgcctgtaatcccagttactggggaggctgaggcaggagaatcgcttgaaccagggagttggaggttgcagtgagtctagattgtgccactgcactccagctgggtgacagagcaagactccatctccaaaaaagaaaagaaataaaaacctatgagttgggtcagctttcaatttgaaggacttcattttaagcatatactaaaagtagtaagtttataagtaataaaagtgctcacacatggttcagctgtagatttctatttgactagatgctagtcacgacatatagcaacaaaaatctacaggtttagcaacaaaaatctacaggtttagagttatactccacaatggcaacaacaaaccaaaatatgaaaaaattccaaaatcctctgtatttgtaagaaaacatataacaaaaactacaataaaacttaatttaaaaaaccgcacaatttttaaaatttaaaattctcaggacctggcccttgcagtggctctatggattcttataaagcaattttccactgcaggcacaaaggtatcaatttcatttggatttatcaatcttcaaagacttggctgtttcatgcagagaaaatgactactactaagtagagatttaagaggcaggcaagtttaaagttgaaaagtccctagatttcagcaccacagactatgaagatacatattgatttcaggtgtctcacattcctatgaccactggaatctagtagacaacattctctgctctgggacaacatctcttaggttatatcagatatatctgatgactaaaagatgaacaaaatctacaaaatcatgaactaagtcacaagttacacagatgtgctaaaagttaaattattattttaaagaagacctgtcacatctaaaactaacagagaatttgaaataagttttcttaataaggtcaaaaatgaacaagatatactaggagaaaaaatccaggattaaaaaaacacacattaaaaaaaatgctacagtgggtccacgatgaatgcaggtagcaggcttcatgacttgaggtctcaaggtttctatccagcttggaaagataatgcaggtgtgtccagaaatcactaacaaaaccggggagcaaatatttagaattaaatgaaaggtaagagcaatgactgcctgtctcattctgagtatgaagtggggtgtaaggaatgggtgagatgtgtcagcgtgaagaagagtgggagggcatttccagaagaactcaatgccaagggcaaagggaagcccaagatgagatgaacagacgatgagcagagtggcctgatcagaacagcagcttaacgctgtacagaaagcaagggtagcagttgagaaggaagaggtggtaggaagaccagagtcagggtacagtggtaggcgctgaaaatgacaagctgagcattcggtgtttatttttgtcattgttctttttttacgacttcatgtgcccagaagtggatttgtgagggcacaggaagcctctgaaagcttcataaagaagggagataggatgtaaattcaaatgaggacatttcagtggcaataagtatgattcatagtcctccaatgctttccgaacagtgcctgtgtctttcctaaggaaagatctgattttcttggcatcaggtgaaaacttaataattccctgtggctagctttctagttcaattagctgttaggttttcatcgtgggcagccactagaactgcacattatattccagagccaaaagtactgtgattataaggcttttttcctctttatgttattataccaaagtagatccaagtattgttattcatcttaaggcaaaacaaacaaacaaaaaacaaaacaaacaaacaaaaaacagtacctgtgttgtacctttctagataaactattagttttatgttttcaagggtagattttcttattattcaggtgaggccaagaggtcaggagatgattatcatggaaaagacagtttgttactcagctcccaagaagccggtacatgccactacatgcagggtcatatgggaagcaccagggttggtcaggaggggaaaacatgagcaagagccttttattgtggttttcatggaaagaatgagcgaagcagggtaggcgggtttaggactgattagttcaaataatggtgatggggcatgaggttgtccctagtggtctggtacctggtcctggggtgattagagcaggtgaatagtggcccagagtataagaaggtggttgggagtaaggagcttttgattgactggtttgcatgggaaagacatgctcaggggccattcatttggccctgggagggaggaatcttcctggggtcagcagggacccagatcagaaattacaggaaagattaattgtctactaaagactgactgtgatcttagaaaatacgcagcagtctaattcataaattgcatttaatgtctctcaagagattaagcatctgtgctaagacaaaaatttctcctatcttctgatatttgccacagaatattaacactaaaaatgaatggcttactttaacctgagatctttattcattcacttttatgtcctacttcttttccccccacattcactcctaggtttgtagactacaaatcagaaaagtgactggaaaataataagtccatatttgttgattgaatgaatgaatgaatgaggaatctgagcaagggctaaaatcctccatattatcaaactccaatacaacatccagtgcctggtagcagacatagcttcaattgtagttgatagtatatatggattagccatgttttagacataagttattttttaatttgcttaattaaggacctgctaaaaaaaaacaaaccaaaccaaaacaggttttttttttttttttttttttcagcaaagtataatgaaaggagtactgtactaggagcaagaaaggcctggattctaaatgttgtctctggctcactgattttgctttgtgctaaaatgggaagccactctctcgaacctctattccactatgtatcacttaggagactagatgaaataatcactatggttcagctcagttttaagtctctatgattttacagactgtaaacaatcgtaggttcacaattataacagtctgggatttaatacaaaacctcatctttactaaagagcattttgatggattttaatttacaacatgttgattacaggtactacatatacacagaataataatgccaagtacctttcttcgccagagagaatgttacagacatcatttaatttgtgcttacaaaatccaactatacctggatccttcctaggcagcatgttcacggaggatgcaaaaaacccacaaactgtgcccacacagtaaacatttaaaattagaactttacatctttaaagatcttgataaagccagcaggcctgtggggagactgaggcagaggcaagctcaggtttcccaatatcgtagggctgaatgatggaagagccagacttacctgggacattctctctcggtgcttggcctcaagcctctctttggctttctggaaatgggcatgttcattctcatccccaggtgtctcgagatacttgtcaacggcatcaggggtactggctgctgttgtaggaactataaagtagaagagaaggaggtttgagaaaaaaaagccaacaacaacagaataatccactcgtttaatagaaagccgtattttcagttatttctcagaacagagaatttagtaaagcagcgcatacaagacgttaatgctgtttaagagaacaccatgagacactgtgcagcacagtaaggatgtctttcaccactcccaagtacagaatgaaggaaaaatctttaaaatggtccattttgcaattatagcattagagttctttacgaaacaagcatgcaaagagcaaaaacagttggtgctgaagacatgtttttccaaatccccatgctttcctaaattactattttgcaattttgaaagtaaatgatgatatcatcaatatcatacactaagactcctgcagaaaccacagatatctgtaattagcctgttgtagaataacggcaccccagggaaaaggtaaatgtatgatgtatttagataactgaattacgaagacaaccttcatgagacagtatggaaacacgacaaaagatatataaacatcaataaacacatttttgaatcacaaaaggacttttctgtcttcataaatttgacaatagtcaatgaattcattatgctagttgtcaaaaagaaagtgatttctattttgaattcaactaatactgctaagcaatatttgaattgcaacatatactgctatattatgtaactcatgagccaagtgaattataatacctatacaagcaattttccaaaagattagtgagaattcagagtatttatgagcttaaaagcaaaaagaaaaaagaattttgacttaagaggaagcatatttaacataaaaaacaaaatgagacgttttcactatcttttgagatcaaatcaattgtttcattcaaaaggttattcaaatatcaccaatgttccaagtattcctattgaattattacctgtgtattacatttgggatataatatctcaaagaggacttcaatgagaagaattgatagctaagtcattttgaaactaaacttgaagttaaatacgttttctacatccttcaagaaaatgtctggaatcttaatccaaagtcttcaaagatattaactaaaaccggaaggctgttaaataattaaacagtatctttcattttaaaaagaaacattcgttttgattttttccctccacttcaatcctgattaataatcatttttcaaaaaataaaagcagttgagtgtctatccagatgttgctttcaagtggaaggaaggaggcagggcatattcctggtgcctttacacagctgcccctgtcttctctgtagcaaatgagggagtggtgttccttcttacattggcagcaacgggggaaggaaggaaggaaggaaagagtcatgtggggatttgcaattaagcacatttggatttgaatcccatttctttttcagatcagctgtgacctggggcaggaaacttaagcactccatgtttcaatttttttatcaagtggtgataacatgccgcaggacatgataggagagctgggaaaatgagataccataccacatgtaagtcatccggcagagagggtgacacacagtggagctcatacatgttagtggccttccctcctcctctgcttaatacatcctgttcaaatctcagagctaatgctaaccacgggaaagttctgatacttttattcaaagccactgaaaatgttttggtagaagagtgcaataataaagaaaaaaaagaaaaggacaagttttaaaattttaaaaattgagaaaaagaaacaaaagaaaatacaaactaacaaaaaataaataaaatagaaccactgaaaatgaattacacacaggatcacaaagtgcaacctacaggaaaagcagtatgtatttttcaaaaaatgttaggtgtagcccacataaaaaaggccgaaagtatcaaaaataagtaaattgttaatttgtaagattgaaacaataattttgaatattaagacctttttggaaaaaaggtaaatgtttttctccatagcttcaagcaaaccaatatgcaagtatttttaacttaatcattaagttaaaatgaataaatgctaaataccacgttcttactgactttaacttaatgattaagttaaaaatacttgcatttcaagttcccaacttgaaatgaacatggtatttagcatttaaaatgtgcttccctagctttagtcatcttctcatcttaactggtagagctcaaatgagaacaagttaaagtaaaagcagaaaataaaacagtaacattcttttgcatagtccaatctggcagaatgacatgtttaggcaaaccatattttatgtttgaaacaaatgaaaatgtataaatatttggggttatacctgctgatgaagatagtcatctggctgtaactgttataaccataacataagcacccctttggaaaactggaatcataaaacttactatataagaaggaaattttttcagctcctatggtttgcgaacactgtctactgtataaaggaaagaagataaacactataatctgaatcactataatcagattggcctaagtagaaatgcacttagcaacataataagagaataaccatggaacatgaatgtgaggtatgtttaataggactgaggatattaaaaaggataaaaaccttctttttaggcacgtggaaatgaatatgaatactatattaccaacttaatccattgaatccagaaatatttctgtggtaattaattttctgtgccaacttgattgggccgcaaggtgcccagattaaacattgtttctgagtgtctttgtgagggtgcttctggatgagattagcatcggaattggtgcactcagtaaagtaaatcaccctcctcaacatgggcaggaatcacccgatctgctgagggtctgaaaacaaaagggcagaggatggagcagttcaccctttttatttcctggctgcctgagtcaggatattggtcttctcttctccctggactgaaatttacaccattgtcttccctggttctcaggcctttagatttggactaaatcataccaccagctctcctgggtctccaacttgcagacaacagattgtgggacttagcctccataattgttgtgtgagtcaattctgcagaatcaatctcttcctatacatatatatcctattggtcctgtttctctggagaaccctgagcaatacaatttctcttcaagtaaatctttgttaacagtcccagttatttcccatagttgaggaagctgtgtctctttttatctttaactcaaatttttcagccattcatacaaactccccatctcaattagtgtgagtgaaattatcctatattcataccaaccagcaagccagattactgtctagtcaagcagagaaggatagcatatgctgatattgttaaatgaatttaatagttcattactactgctctgcagctggtgaggatcccggaaggagagagcaattttaaggtggagtatgtccagagagctcaacttctatttcgtgaatatccttatatcctaaagagattaaattcataggactgactaccattttgtgattatgtccacagaaggccagagacacgtgtgccctatgtcctcacccatcaaggtacttccttttgggaagggagtggggctcaaggaatgtcaggatatgtcacaggacacagaggaaacaggaagctgtatatcagcaggtcactgatatatttaaggtacttaaaacacaggtcactgtaaccacttagaaagtggaaacaaactggctttaggagggtttatttctggttttgcattttaaactaccataaagcagtttatcctgctcacagacctctgagattccacggaacctctgataaaggctaggatttcggccggatggggtggctcacacctgtaatcccagcactttgggaggccgaggtggacggaagtttgagaccagcctgatcaacatggagaaaccccgtctctactaaaataaaataaaataaaaaaattagcagggtgtggtggcgcatgcctgtaatcccagctacttgggaggctgaggcaggagaatcgcttgaacctgggaggcggaggttgcggtgagccgagatcatgccagtgcaccccagtctgggctacaagagcgaaactccgtctcaaacaaacaaacaaacaaataaataaaggctaggatttccatgttggcactccgtctcaaataaataaataaataaaggctaggatttccatgttggccaaatgataacagcctcttttcatcagagcccaccatgctaggcatgttctgtgttctcgtttaatacatgggaagaaaaaattaccctattttattgcgtagaggcaaaacactatcatttaacatacccatttgcatccctaaacacacacaaataaagtctgttaagattgggtaagccataaaaaggctgtaaagctaatttttagagtagtaaagggccaatccatccacatgctggggcactgtaaagggtttttgttgttttgttttgttaatgagcagcacaacttggcaaaacaaccatatgctttgttatgatgtccgttggcttgttttctatgaaacagctgttcctgccccaaacactatctggcaaatccttcaacagaagttgggtcataaagcagggatcaagtgaaagagcccatggagctagaatatggaggacgttctggccttgggtccctccttcagcctgctcactcatgccttctgcaagcaagctggctaggtatgttcccccctccacaaaaacctagacttaaaacgagacaaaacacagggttcaatatccttagctctaggttttgacctctagatgcctagtcattagcagcaataccaacatcacatgcataagcttttaactttttaaatgacctttgtattttagtctcctaacagagccttgaggggcatggtaggatatataggctattacctcccttccttttaatagtgatcatgtgtatctaaacactcataacaaatgaaaaaatgtaacagaaaagcagttctaattcctagtacatcactgcttcaaggtgaatatttgcttccaaatatacagtggcattttggatgactaacgccttctacataagccacatccttattctttgccaccctgggaagtcagaggtatcaaagcagctgagacagcagctctgacatggacaaactatcctgcctttagtgcgcctgttcattcttttattcctccagcccaccaacattgcagcccttattatatgtgaggcacatgggagaaaccaatgagaaaaacatgaaggccctgatcctggtggaattatattctagggaaagaaacaattaccacaagaattttttaaaagccagtaagtcatattgttaatatgtgatttgtattatggagaaaaagaggaaaaagaaaaacagagcagagttcagaaggatcgggagagctgaggggagaggggaaaggtagaccgcagtaagtgagcgaccaggcagagtcttaagtgaggaggtgacattcagatcttcccagctggctgctggaaggacatggcaggcagatgacaaaactagcacggaagccctaagagttgaagctggctggcaaattccacgagacccgcatggccagagctaaagaagcaagagaggaagtagtgggagaggcagggaagaaatgggggacatcatgtacagccttaaagccacagtaaggattctgagggaccagcgtgggctgtttgagggggagtatatgtgatggggcgttttgttgaaggatcactctggctgctatgggacaaaagtagaaggaagatcttttaagaggaaaagacaggctgggtgcagtggctcacgcctgtaatcccagcactttgggagtctgaggcgggcagatcacctgaggtcaggagtttgagaccagcctgaccaacatggagaaactctgtctctactaaaaatactaaaattagctgggcgtggtggcaggcgcctgtaatcccagctactcgggaggctgaggcaggagaattgcttgaacccgggaggcggaagttgtggtgagccaagattgtgccattgcaccccagcctgggtgataacagcgaaactctgtctcaaaaaaaaaaaaaaaaaaaaaggagacaaagatgaaggtggcttggaccagggtggctgtcacaggaggttgttgccctcagcccccttcccacacgagaagggtcagattcccttctttctctcacaccaaaatgctgtattacctcagggaactgaatatgaaaacgggagaaactgctttcacatgtgcgtgagggctcatttcaattttaatactgatacacgcatgcttgtcacaatactgccacttcacactgtgatctattctcaatacctgccagagctctgttttctggggtgaagtaacacaggttagctttcagtttattcataaatggcgatgctgcacccaacgttcctatcacaaaatgctcctccatcactggggccaagacaccaacgaaacattttccatacctgtgtttcctctgagaaaactgttagcatttgaagggaagttactttaaaacaggggaaaacctgctaatatcttcaggatgaggcagacgtcactctcctagcctgtctgaagactccttagaggataatccattaagttgaactgtacatgcactgatttccctcattttagttctgattttgtaatcattgcggagcactccatttcatattcatactaatgtggtacttcacattcatataagaatgtggggtcaaaattaaaggcactgtgaaagattgcccctatcattttgatatgcatttgtttcctcaggctctggggtgacccataattttacagtcacaatggactcaggacacaaaagaagaaatgacccaccttcaaacagcaatgaccgtggccatctccaacaggccagaaggctgaatgtttccctaaaccaaggcttatgaatggcattcagtcgatatattaatattagattctaacaagaaaattgggttagtctcctttcatcagcagaaaagcaatttatctctacagccttggtaacagaagattaaaacaaattaagacctatataaatcattgccttatcattgaaaatgctatttgataccgacccagcaatgttgtcatttgagatggctataatttaggaaaggagacaaggaggatcatttatatatgagtgaaatataaacttgttagcgttcatgtgaaactttaatcttgaaacatggcagagctttccgagtgccatgcttattataacttaaaaaaaaagtgtctctaaaaaaaaaaaaagtgtctctccattttcctaatttcaaaaatagttaaaactcctaacgcattctacattcaaatatttatcctaaccattaagtccaagatagaggagccatttataacaagaaaatacagtttgtgatcctccagtgtaataccagactctcttaaaaacaaaataacaacaaaagaaaaaacaaaggcattctccccctaatatgcccttgtattacaattttatagtcagtgcaatcatagttggtggagaacactatcaatgcatcacatggacataaggtaataaaaatataatctatgatgtgtttactctagtcaagctacatttcttttttatgtccatggacacatactgacatgggaattttttcaaatatatgaactgaatgtgaaggaacgaatgctggcattatttttttattaacatctattctctattcagcacatcacactaaaacttaaaagcaacctcaagtttgaatctaaaaaatatatgtgaagcaatagcaataactggcgtccagaatgggttaaccttaggttattgttttttgtcaatttgtcagaagctattcttgacttcgttaatggaggcacataaagaaataacctgtcatagctgctcaacactcaatagatgagttcgaaaagtcaaaatcttcaatattgtccagtttcatataaactgtagcagtaaaaggagatggtacagttaacctctatggaggtcttaaggataaagctgatttcattttaccccagccttccagagcaatcttctcctacacttctatatttcctttatatggttatttacctctacggcatatctgggtctcaactcattaataaaattatcaggtattgatagccagtactcagattcctttgctggtgtctctcaaaatacctggcctcgcacatcctggggtcaaaaataactgctgcacagttcacaactgcaaagatacggaaccaacctaagtgcccatcaaccaatgagggataaagaaaatgtggtgtatatataccacggaatactagtaggccagaaaaaccacaaaataaaagtcttttgcagcaacttggatggaggtggaggccattattctaagtgaagtaatcaggaatggaaatacagtatgtattcccttataaattgggagctaagctatgattatgcaaaggcatagagtggcataatggacattggagactcagaatgaggaagagtgggaaggaggagagggataaaaaactacgtattgggtacaatgtacactactcagtgaaatggggacactaaactctcagacatcaccactatacacttcatccccgtaactaaaaccacttgtatccccaaagctattggaaaaaaaataaaaataaaaataaaaaaacctgctgtattaaaccaaggatcagcttgctggctaccttttttttcccccttgagatgaagtctcgctcttgtcccccaggctggagtgcgatggtgtgatctcagctcactgcaacctctgcctcccgggttcaagtgattctcctgcctcagcctcctgagtaggtgggattacaggcgcccatcaccacgcccagctagtttttgtgtttttagcagagatggggtttcgccatgttggccaggctggtctcgaattcctgacctcaggtgatctgcccgcctcggcctcccaaagtgctgggattacaggcgtgagccactgcacccagctgctggctacttttataaaagtagtattatcggaacacagccttgtctatttgtttacttattgtctattgttgctttcatgctaccactgcatagttaagtagttatgacaaactgcatgatctacaaagcctaaaatatctataatctggccttgtatgaaaaatatttgctgaccactttattaaacgatccacttaccctcttttggcaaatagctaaacaacagagcagagacataatgaacattcttttaccacaggtagaacatctctaatctgagaatctgaaatgctccaaaatctgataatttttgagcactgacatgacatcatggtggctgggatagcaacacctttgttctctcacagtgcaacgtacagaaactttgtttcatgaacaaaattatcaaaaatactgtataggccaagcgtggtggctcacacgtgtaatcgaagtacttcgggaggccgaagctggtggatcacttcaggtcaggagttcaagaccagcctggccaacatggtgaaaccctatctctactaaaaaacacaaaaattagctgtgtgtggtggcaggcgcctgtcattcattccagctacttgggaggctgagacagggggatctcttgaacccaggaggcagaggttgcagtgagccgagatcacgccactgcactccagcctgggcaacagagcgagactccatctcaaaaaaaaaaaaaaattgtataaaattatcttcagacttttgtataaggtgtacatgaaacataaatgaatttcatgttatttcatcatgaatacatcaatattccgaaatccaaaatctgaagcacttctggtcccattttagagaagagatatttaacctgtattcaaagtagatggcccttctttttaaaaaatgctgagttgctaagcaatccagttcctttcaattttagggtcatctctaattattatggctttgaagaaaaagccattcttcctatctaagcatttccagataccaaagatttagcttttcacacttgttaatctgatagaatatactggcactgacgtgacaggtagtttaattcaccatcacatcttttaatgctttaaaattgttctccctccctaggttggttggggagcaaagtgtaatcccaggttgcctaatctaatttggcagttttagttccaatggtattgcagaatgtgctaatgggaactaacatttgctactgcacagtgaaaagaacaagaatagtgtgattaagaacaatagttcaaatttggccaaagattaaatggcctaggcattcagacttctgtcttatggctcctgtctttacaacgaccctggggttaaggtggcatattccattgaaaggctgcgtggtgtgagttttctacgatttgaaaattatgagcttctgcggcaacaaacttggaacctggggatggaacttggggcctgacttgttaagttccaattcttttcatattctctgtaagtgtaccagtctgtttcatgtcatctggaccattctgatgtgcctagaaatcaatctttttccctccctcaatcctgcatggggtcaggcctacacctctgcacaaactataaggccatcaaacataatcctaaagtacaaataacctgtgtagcaagactataggacatctctacagatggttgtcctccagcatatcctgggattctaggaaactaagatgaaacagagaggagaaaggggtggtgcataggtgaaccaatgacttcaaactaagggatttgctggtttctcttctgctgccacagtagcttacattagagcaggaaaactacgagaccttcaatactatagtcaggacagcaacagcaacttccactttaccttgcaaatattgagagcttggacaatagtctaacaaattcaatttcaaacatctgtcgagaattggatgatgctgacattctaacatttcaacatgcccccaaatttgtggaaagtacacgtgtttacaccaggagagttctatctctgagtcagatgtggggaaactactactctagaacaggattctcaaccagaatgtgaccccctgggcacatttagcaatgtctagagacatttttagttatcacagctggagttgtgttaatggcatttagtgggtaggggtcaggggtactgctaaacacccatatgcctaggacagactcctaaaaattaattatttgaatcaaaatgttaatagtgctgaggttgagaaaccttggtttagttgtttgtaccacatgtcagcgcaaatgaaggagcctgagatgggacacactttggccagatcacatggtgcaatctgctgactaaaaattggcatgatgctctttgagagattaaatgccattaaggagttggtctgtttgccttttgggatgcagtctgatggagacagcaccagaaaaaatggtcacactctcatatttaaaatataaatgaatccacaaatatttatataattttattgtctacaaatactatattttgaagattaaatgtgaaaccttttgcactgtcctaaacccaaatgggcaggtgcaaaactaatgtcagaaattaactcagctctcgtaagattctttatcccaaatgagaaagggtttttttttaatgatttgaattcctatgttcacgaataaaatgaaagctctcagccttatatttgtggtttagatttttatttaaaataacaacaataaaatatgtccctaaaattgcaatgctcaaaattggtttttatgacaaaagtttgaaacctagaaatgcctgatttatggcaaattattgtttttataatgcaaaccatcatacattttctccctaagtgtaatcttttatcagttcaactgaagagctttttctatctcctttcacatttgttatttgactagaagcagcttagactgagcaacctgtaaaaccaaccacctttgtgcagaaatatcatccaactggctctagattgttgaaggagcaaagtcaagtccaagttgcccagtctaacaggcttgcttaccttctagttcagctccttttctctgaattgagtctgccatctgaatttgacctccagatgaccatgactttttcaaatcaaatgtgcagtttgctataaataagaccacatagctgcacaggctataaataactagaaattatatgtttttttccttgtctgtttgtactagcactgcaaaacccttcacttgctgtgattgaatagtctctgtaggcagacaagaaaatatagctgcccaaagcacttcatcctcctagaatggaaaggtgtcaggatcccaaatacactgcaagtagatggagaaaattactgggaaggagaaaattacaaaagagactttcagtatctgtttggaacagtggatgatgaaagtggtagttacgtgtacagcatgaaaataaatttatcagacaatgatgcttgtttccatcagttattaaaaatggaaaaatagaattcttataaatgctaaaatgaaacaagagaaaaataatcactgttttataaaagaatgggaaagacatttaatttactgatgcgtgctctattcatggcatttaggaaaaaatgttaacattcttcatcctcttttcactgttttctgtattcttaaaatgtgcttctgaatcgcaaatgtgatttcactaaccggcaaaacaatgtcagaaccaatgcttagccatttggtgtggagtgcggccaaaacgtcattttgggtttcaaagcctggtcctgccatgttcgatggcttgggacaagtcactaagctcttgaagcctcattttttctcgtatgtacaaaaggaatgaggaaaatgcccacaaagtgttctgaagaaaaattaaatgatctgtgaaaatgctcggtacaatgcaactcaacatgcgtacctatgtcaacactatagtggaatagctagagctttttcctagtctgtcaacccacttgctgtacttacagtgtttttagagaaaaatgcttttttcacaacagcaaaagaaacgtttatgttgcagcagtacaaaccacatccttcaaaagttatacataatgtgaattattctgaatattttatggaggccattaaaaaactttatagtttaggatgcagtcttttttaaaatacctaatccttcatctataatttatcatctttaaaaaagataactggcttcatcagttttgagatgagggtttttttttttcaggataatgtacacaaatgctaattataaaatatctaagttacaactgaaattgtgcctcttcttccagcaatcataagcataaatggcatatatcatccctaacctaacactggataaatctatttctggatggaatccaaattcaaatatgagtactaaaaccacattttaaaactaaactcgtctgatattacaactgaaataaaaacaaaacataagacactgtaagtaaggcctgcagtggctggacaatgcatttctttataggaggctctttctctacttcctagtcaaaaggtgagcacctctaacctaccattatgccttctgggagaggagaaagaggggttcctaatgtctaaaagtgacccttcatgtctaaagttgaaaccgggtcttataacacacataaattgaaatctgcgtgtacgaattagtccatgtactacaataccatgaatattaagtactttttctgaggaaacaagttacttatgtattatagtctcttgttaaatcatggcatcttgatgtaaccgagtactctattttaaagatctttcttcctttcttttccttccagttttagtaatgaaatggtaacctttgctctctttcttcccaccaggcactccctgcacagcgcttccattatctaattacgcttataattattattaaaattattaatgcttgcttagaagttccactgactgacttaggcaccttcagaattctccctcatcaggagatcacctcaaggctgcagttaatttacaacccgattgtgcgggatgcgccagcccacttaccgaactggataataactcaagtctttggaacaagtcctgtatagcagcacctcctcacccctccttcatgccctgcattccaagctcccctttttaagcctttgttttttaatccaaaatttgagatggttgctttgaggcaggagcctggaccatttccccattgctagctttgctaagtaaagtcactttccttccactgcacctagcccttgttcttcagttctgcaaaagcagtgagaggctaagcctgctctcagttacactgatagcttttaggaaataaaatagtaatggcaaatacaatacaatgatgttgtccatataatattcaataaaaccagactaaataaaaaggaaattggtcagaaatagaagaaacttagtcaatgatgttcttagcccaacatctcaagctgtctggcaaaatcagatgtaattacaagcaaggtaatgggaagaaacattttactaagacaggtgttcaagaaacacaaaaccatgcaaagaaggtgatgatgctggagttatgtgaaccaagcagcatcctcctcccctcttcccttccctcaggtgaatgacaacgtacgtttaacaggatctcgggcaagaggttcctgggtagtcttgagtaaactttgggacactatggaaaaaataagagaacataactaaaaacaaaaagagaaacatgggaatgatggctgaaatgcacgagtccactgacaaaaaaacaacctaacaaacaaaatcactcacttaggtttggtccctccaacaaaaccaaaatgaacatataaacataagatctattttcgtaagaagttaacatttgagaatgctggatattttgtctctgatagtatatccgagtaacaacaggtttcttaacagaagaggatttcttgctccttttgtgccaaatatccccaattcccttcgatgcattttttcacaaaaactccatttatttcactcattcataggacagcatgtggctctcggctctggctgtttgctgaggcttatactctctacttattcttgtccacccatctaactgatcttcagcctttgccttcttcatacattattctgtcacctttcccctctaaaatcaggcatagctagcctcatctaatacatctctgttgggagcatcgaccttttgcaaaaccctcagcaaactgtgtgccacccaggacacctggacaggtgcccactggtcactcccagcccaaactgatcaaagggagagagtgttaggtgaagggatggcagtactggggtgaggtggagagaattttaatctcttgaagcaaattcatcactgctaataattaaaaccaaataaatctcttattaccaaaaactatacatgatatttcagaaaatgaatccacccagggaaagggagaaaaaagttgcaaatctgccaggaaacctctcccaccggctaaaccagtgagaatcactgtaacaaaaggcctttgttccaaaggctgcaggcaacagaattctccattgtgttcgcaatacctgacctaattgactgctttgtttgaaactgaagaagggagtcctttgagccagaagctgcaatcatccaatcagagccagaaaaaaaaaaaaaaaaagcccttgaggttatcagttcctacacctgttcacacatgggactgaagcagtcatctcattcactggcgatggcaggagaccaacaggagcttttccattacattcctcttagatcctgggctcctttacagtgggggtattaatggtgcaggcccttctgttgttttgcttaatcctaagatcttgctgcaaaacaatttatataatccctaggaatctcaggcaggaaatgtggctgccacccttgcaacacagcggagaattaggcaggagtctctcaaaaaagtaatacacagttattgagtttcatttttagttatcaagctgagctgaataattacttcttgagtagttcatacttcctactcatgaacaacaacaacaaataaataaataaataaataaataagcacaattgggaatttcacttggaagtctgttaacgacatggaagtctcacatctggtactggacctcctgagaattacctctttggggaaaatttcatcatgcacttaagtcatcatgacttcatatttttatcccccggaattatgaaaagcttaatgttcaagagaaagactttgaaaattatgttctggcggggtgcagtggctcacgcctgtaatcccagcactttggatggccaaggcaggtggatcacttgaggtcaggagttcgagaccagcctggtcaacatggtgaagccttgtctctaccaaaaatacaaaaaattagccgggcgcagtggcatgtgcctgtgatcctagctgctggggaggctgaggcaggagaatcacttgaacccgggaggcggaggttgcagtgagccaagatcacgccattgcactccagcctgtgagacagaatgagaccctgtctttaaaaaaacaaaaaaaataaaattatgttcctcgagccttatgtcattgaaagtttctcacgttaagtcaaaagttttcttctactttcaagagaagaagcagaagtttgacctggcaaatgtctgtgtgctgagctcggagggggcaagacgggcacttctaccctccggcatttgagatgcatgagctcaattcaatcacattccctcatcagcacaataaaagacatgttatgaaccaacttaaaggtattcatcacagccatacaccttatcaatgcaactcaagctgcatcagccaggcttccagtggtagacagtatctgcacaggtagtgcacatgcataaacatgaacacatatgtacacggacaaacacataagtatgcatttgcagaaacggctggctgcagaagacaaaacagccactccagctttgtttaaaagagaagcactcaaaagtccctctggattgcaagacatatgtgctacagctaggaagagaacacatccatggccatgctttatcagggaaagacggagaggtgtgctcatgattgaacatactgcggagactctgagcaattagagaagtggacagaaatgtggttagtggtagcaacaggcccattcccaagaaccaggaaaatcaatctgttacaaaaagcagagtcagtggcgagagagacgaaaggtggccaggctcgaagaagggtccacttactggcgctgccacacacggccatgcagtactcttctgtgtcaaagttgttccggttgccgccacatccgccgtaaaagaatggggcacacttcccttcagtcacatcaaagtaccagcgggagatcattgctcggcacggccccgtctcggcttgttcagagcacacctctaatcagaggagatgtggggaaccacatttagcatgaaaaggcactgtctctctgttcatgtatacacgtttacttcttttaatcctcccagtggcaacctggactggtttattaggcagcatctaccaaacatttactgaggaatttaactggccaccaggactagagatttacacctctcagagcatgcactgtcatctggtttaatgagtgcaggactcggtagcaataaaaggattccggccaaaggtgaaaagatcatttggctgcttttagatgagtatgaaatgacggaaggtatctgcacatcacaacaattctccattataaaaaataaacttctctttttaagaagtcaactttcatgtaaggaaactgctttggttatgaagcgaaagtttaagccctcacaaacatctgattgctttccttaataaatgattgccttaactcaaatataaaattaattgcatatattttgaatgttttccagtgttggaagctgtctgtccattgactttatctggaaacacatgtcatatctgtaaatgtgacttatactcaatgacattaacttaagaccattcatttgtatattaagatatgtactaatataaatggtcttaaattaactctgatttaagaccattttatttgtatattaaaatatgtatttatatattatacattaataatttaattacatatgcatgaagtacatctataacaacgtattattaattctgctatttaattgatatttatatattaaaaatctgtattatttgtatatatttacatacacattaagtacaactataacaatgtattatttaattatgctacttaattgatatttatgtattaaaaatctgtattatttgtatattttgtatatttacctgacccttgggcaggaatgttccaaacaataaaacgcagtcaatcaactccaactgattaatacacaccacgcactgttatacattaaaacacatcttacctgtcaacatgtcttgccaccctccccaagatcagtttcactcatccctgattgcctcaaagtcaatcagtgacccatccaattgcatgtataaagtcaatcctgagtagaattataactctacctcccatgtatatcccatttttattggaagtgaaacaacagcccaattctctctctgggtttgtgccctgcccttgctagactgacgccttagcacacacagatgtcttcttagttttactgacagaggaaaaaacacctttctaaaagatgaaagccacgcatcacccattacttccaagttaggaatattcaacagattctttttttctttttatgagacagggtcttgcactgccgcccagtggcacaatcttggctcactgcaacctctacctcctgagttcaagtgattcttgcgcctcagcctcccaagtagctgggattacccttgtaccagcacgcctggctaattttttggtatttttagtagagatggggtttcaccaggtaggccaggctggtcttgaactcctggcctcaagtgatacacctgcctcagcctctctaagtgctgggattacaggcgtgagccactgccactggtccttcaacagattgattctaattagccaatcaaagacaaggatccatcacatctaggcatggctttgagcttcacaggccagaagctgctctgtcagtaactcagaggggatatggtccctagacccaattcacttttaataaatcagggtgccagtcctttaattttggaagataaataaaattgcgaagtagatgggatacttacgtcaacaagttggttgggtttcatcctgtaagagtattgtgtacagaaatccaatttgctttgggagcgtggactttgaaagcagcagtactgagtgagatggccttaatgatggatgataatgaggttgatgctttcgtagccacgtttccatctgaaaaccacgtgaagagtgtcagatcatcttcatgtccgttgcatggcgcatttctcctgcggagtgtttgacaccttctgggcttagtgctgactgtccctcctgttgacatcatcgtgatggtagccacctctggttttaccagtactttattgcatctactgaaagagcaacgtgtatagggaagtaaaacaatagttagtccccatttgtattgacattgtggatcccatcaactatagccagcagtggtctctgctcccagagcttaccttcagttgtaacaaacatctacagcttcactttgctttccttctctgtatctccttcaccaatgtgtacatattcatgtcacatgctctttaacgtttctaagacacaacaatacccattattaatctcttactcaggcagtgttaattccaataagactgcaaggcagcagtgcctccagagcctgcactgtgccgggaattggcactgggattgcaagcaccgtggtcattgctaccaagggaggcacagaatcccttcaccccatagtcacgggagcattggcaacaaaatttaccatgccttggcaatttatgctgaccctcacattttggcattaaaaaaaagtatcatcttagagtaccaaatatgtgtcttcttatagatgtgtgccacgggcctcgcagtgaacatcacagctctgcagatgcacaaaccttgtctttatgagtctatatattaaataaaagtggtagaattttggatgggtgcaagtcaagtaatgggataaaagaatgatgatcgaaggagatgattcatgataactatgtgcccttatgtgaaacctagcaacaatttcttacttatgataaaggcacaatctccccagtccagaatctaaatggcattatattaacattttcctataccactaattaaacataatgctacattcattttattttcttctgcctcattctataacagctatgaaaccatttgttatagctaattcgtagaagccaggctaaatgagccctaatcaactagaacaagcattcagaactcaaaatccatttacatgttaattaagtaaatagtataagctacacgttgagcctacaactcttgctggagtctccagctgtaagagccttaactccttcctttcataaaggccaagaaaagagtgagttagtccctattcggggagtgttggttggttctcccaatcctgttaggggcagttggcactcttgactttgaacggcccccaagagtttcactgccttggtggagtccaagtgggcatcatgggcaatagcaacagatcccacaatactcaaatacaaaaggctacctgagataatgcggtcaggaatgggtgtaacagtgtatgttaatttaatgtcaaatacataatgtatggagaagatgtacgtgaggctggaagaacaggactgacagtgtgcttttgttacttctcaatctctaagagacagctaccttgtccaactggttctcatctgctgacatggaggatgagcagataggccttctcttaacatgcaacccctctcctggtgaaaaagagcttctcgttataattcccccaattgtcagcaaccctgattccccatcacctcaactctcacttcccaacactttccctcagggaaataatgagaacagcaacttcctacagcagtgaagctgacttcggagaggactgggaaaggaatggaacgtatcctctatcactcataattatattcctactctactacagggaaagggaatgcaactgtttgttttctctgacttttttgctaaccctttattattccagaacaattttccatgtagtagaaaagagaatcttagcctactctgggagaagctgggactgagggtagggtcagcaccagcgatgtatgatgctaatgcttttacacaaagtatgaataagcacacaagaaatggccagtgcctctcagaagtgaacacggagaagcagcagcatagacttgggttaaagcagtgttaagggattaatgtcaatttaatagttgtgatactgtactgagtgaagactatgcagggtctctttgtattaattctttttttttttttttttttttttttgagacagagtctcgctctgttgcccaggctggaatgcagtggcactatctccactcactgcaggcttcgccaagctccgcctcccaggttcacgccattctcctgcctcagcctcctgagtagctgggattacaagcacccgccacacaccggctaatttttttcgattttttagtagacacggggtttctctgtgttagccaggatggtctcgatctcctgacctcatgatccgcctgccttggcctcccaaagtgctgggattacaggcgtgaggcaccgcgcccggcctctattaattctttcaactgcatgtaaatctacaattgtctcaaagaaaagatttttaattttttttcttttttattatactttaagttctagggtacatgtgcacaacgtgcaggtttgttacataggtatacatgtgccatgttgtttgctgcacccataaactcgtcatttacattaggtatttctcctgatgctttccctcccccaaccccccacccccccaacaggccctggtgtgtgatgttccccgccctgtgtccaagtgttctcattgttcaatttccacctatgagtgagaacatgcagagtttggttttctgtccttgtgatagtctgctgagaatgatggtttccagcttcatccatgtccctacaaaggacgtgaactcatccttttttatggctgcatagtatttcatggtgtatatgtgccacattttcttaatccagtctatcattgatggacatttgggttggtgtcaagtctttgctattgaaaagattttaaaaagcccacataaaaaaatgaatataggaagccaggcatggtggctcaagcctgtaatcccagcactttgggaggccgaggtgggcagatcacctgaggtcaggagttcaagaccaacgtagtcaacatggcgaaaccctgtctctactaaaaatacaaaaattagctgggcatggtggcgtgcacatataatctcacctactcgcgaggccgaagcactggaatcacttgaacctgggaagcgtacattgcagtgagccaaaatagtgccactgcactccagcctgggcgacagagtgagacttggtgtcaaaaaaagaaaaaaataatgataatataggaatattgatttttcagtttgcctaagagttctaaccttgtctctttacttgactcagagattggaagatttggaaatctcagtttgagaaaatttcctttacatccctctctagcaatgggatattagtaagagatctaaccaatcaagatgctcaccaagtagaagagttttagagcactgagacctgaaacacatcttcaataagccgcatctagtttcatggaagataaaaatatctcaagagagagttcaaatgcttatgtttacattttctatttttctcaatagcataatttcttccttcctaatctactgaaacttctaaaaacatcagcaaaaaacctgtttcacattaattactattatcactcagtggaaatttataaatcagccactaaatgtagaggatgcaaaattagaccttatataactaaacccaaataagattcctgtgaaaattaaaaccgtatcttcaaaatgtatactatatgtaattattatgtcaattaaaaataaagttgaaaagaaaacaaatttaagaaaaaacaaaaaactcttcatctgccttctttgttctcttctcaaaatgtaaaatactgagaaaactaacattttgaaatcatttttgaaatcaaacttattttttgatttccaatccacctttctgttcaaagtaaatatcagagataataatggagaaaatttgttcagaaaaataaaagcaagaatatttcctaaagagaaatgttagaaacataggcaaagacttacatggctatctaaggaaccacaatcctttattgatgttgaatttcttacactttcaagatcacaaatagcttttctgatattcacttatctgaattctgctggcaaggaagcattatgccttcttttgtaacaactctgctcactcttcaagacaaaatgccatttactacactgaaatgctggtgtatacgaaacacaaagcaaaatcatgtgcttctaataaaactccacgcattttatctttgtaaggtaggcccttgctgagatttgtgctcgtgtcaacgctacattccattttctaaaaatcagtataacacaaaataatacagaatctaagccagagctccctggattatacaaaatgattatgcaattcattgttcaaaaaataatgctcaaccacaaaaaattagttctgaatagatatttcaaattggagtgaaattctttgtggacaaccaaggttagaaagctgattttacatattttaataaatttagaatgaacacagttgtgaaactggcaaccagaatggggagaaaatctccactttcaaatgtacgataattataatgccttcttatgaagcaaagttaacagattagcaaataattcgctgtaaataaagtggtaaataaagaataaagctggttttagaataaagcaaagctggttattattatttcatttttaatcattgaatttcaagtattctcagcctactggaatgtatgtgaaataaaactatattccatgtgatgtataaattttaaatttacaaattttgggaaagcagtcacaatcaaactagtcatttagagagagctaggaactatattttctgaacttttttttaaaaggcaacattttatagcattattttctccatactctacaagaatatctacttaaacttcacataatacaactatttctcctttctgacagaaattccctatcttgaactctttttctccaattttaagtagagtaaaaagggcaaatgtaagacaaatataatttatttttgtaataagttacttccttaatgtaacagtggaataaaatgaaaacgacataaatattaaaatccactaagtatacaaaacttcaatatttcaaataaacgttataatttataaatataattataatatattagattataatatattatataaaaactttataatttataaatataatttatgtattatatttataaattatatattatatactatatattacaatatataattatataatacaatatacaatttatatacattttatataaatgtttacataatacatatatctgtctgagctcaatgtagttcataacaactttatttttttagcctaagttattgctgtaattctaagtattactacgtggtgacatttcatgagcctaagttattaaaatcaaacttgtattctgttgaaaaataagcagacaatatttgcatttgattctactgatgaaaaaattttaaaagccaacacaatagaaaactggttattttttaagaacgtgattttcccaattctggaaccatgtacttttaatagaaaagaacatttttcaagtgcttgtacgtagtggcaagcagtcgtcaaaaaacatgtttagaaaattactctaataaggcaataaattatcaaatatttatgacctagtaatcatattttactaaatagaagcatgtaaaattaggcaagcaagcttgaactgaagtcttatgacaaatctcacttaagctccaaatatggattgaaatacaaacaaagatgatgcaaacagctgtgcatgctaatgaaagcactgcttcagtacaagaggatggtgctaatttgtcacggaagtaactagaagatatccgcagttggctagcctttttactgaattgcgttaattctctcaggctagccaatacatctgtcattctaattatacctgacccaattctcatctctccatgatgaaagattgtttataaaatgccacctgaaggagatttacttgtaaagtatttagactaatcaggactcccgtgacggtgttagggaacactcacaaaagggtaccactgtggtttttcctcaacctttgtttcctgtttgttatgggaataaacttgctcttcactgagctgcgtggttagcgtgcaacaggctattaacaagaagctcaaaactcgggatatcatgtcctgtattggaaaataaggggaagtgctttttcttactgaatgagagacaggagtatgctgggaaactggcactgtctagaaaaacaaacaaatagaacactcttgagttacagtgtatgccaactgccatggtataaatactcccaccattggtatttcaagctactaatggctatggcttacaaaattcctctatactgtaataattagcttttacaggctagcaggagttggctacactaccatgttaatgacaggaaataggggcacaagtgaacacatgtagggagactgtaagagtttttcggtttccttggtcttgaggtgtgaatttaaggaaagaaaagctcagtaggtagatgtctcaggattgcctcatacttgttggtatctgtaatataccaagaacaataacaccaaaggtaagaatggttttccttttcagtttcttacttcctgtctcaatgctgcaaatctgcaccatatggaaggcaggagacgctactagagtctactactcaaaataggatcatggaccagcagagtcaacaccacctgggactcaggccccccatacagactcaacaacgattgttttccaagggccttggataactcgaatggatatctcagtttgagaagcagcatgatcaaccttatcttttaaatgcaatagatatgtcaaaacgtgagacataagatttaatcattttccaaaagaagtagttagggaagaattagtaaaagttgcataggttttggcttattaaaagaagtacacatatatttgggaaaagacagatacaacaaaattagtagtcttaagattcaaatatacagctcaacaacttaatttgaacagattgaacagattgtctatacacatttattttactctgaagttctgtcctatctcaagcaacattaaaacagcttcgatacctctgccttagatccagtaccaagatcataattttcttactcatattaagactattgaaataccagacttcttagaaagctgaattcaagtggtatcattcctataatatcccagaacatcagaaatatcaaagtttttatttttacttgtaaaaataatgaagaaagccaagatcaattcaagggcttagaatatacttcctttttcttttcttttctttttttttttttgagacgaatctcgctctgtcacccaggctagagtacaatggagtgaactcggcttactgcaacctccgtctcccgggttcaagcgattctcctgcttcagcctcccgagtagctgggaccacaggtgtgtgccaccacgcccggctaatttttgtatttttagtagcgaggggtttcaccatgttggccaggctggtctcaaactcctgacctcaggtgatgcacccacctcggcctcccaaagtgctgggattacagcatgagccatcgtgcctggccagaatgtacttccttataccacttctctgtaaagaaagaattagatgatatttctgttccggtttaaaaaaaaaaaaagaaaaaaagaatgcctctagatgtaggtcatgggttggaaggatggtcctactgtttcatgtccttttctggggaagactgacatgtacacctctccatgttaactggcttcttgtcacaatctctagcaggcaaagaacctacagattccagctgggaacagcagtgtctctggttacagcacagatgctaatcaccatttgctattttataacagtggacaaggggagagtgaattccttttgaacaaaaaaaaaaaaaaacaaaacaaaactaggaaagcagtttacctccatatctcactgtctacatggcaaatatgcatacgcaatgtttcaagtcaacattttatgttgttttctgtttctaaataaagctactagactacattacacattttatcaaatacttgcttttaccttactaaatgtgtatttatcatatttgctttggcatatttttgtttattttactttttcttatacaataaaaaatgttcactggttatctacaatgtgcaaagcagtgatacagaagttagagcttacattaaaatgagaccagccgggcttggtggctcatgcctgtaaacccagcactttgggaggccgagatggatggatcacttgaggtcagcagttcaagatcagcctggctaacatggtgaaaccctgtctctactaaaactacaaaaaaaaaaaatatattagccgggcgcagtggcaggtgcctgtaatcccagctacttgggaggctgaggcaagagaatcgcttgaacctgggcagcagaggttgcagtgagccaagactgtgccactgccttccagcctgggtgacagagtgagacttcgtctcaaaaaaaaaaaaaaaaaaaaaagcaaaaaacaacaaaacaaaaaaaacacacaaaacttagctggtcttggtgaggcacacctgtaatcccaggtactcggagacagaggcaggtgaatcgcttgaaccatggaggcagagattgcagtgaactgagatcgtgtcactgcactccagcctgggcgacagcaagactccgtctttgggggatgagacacagtattgcacgggtatttctctgttcacttttttatttttatttatttatttttgagacggcatctcagtctgtctgccgagactggagtgcaatggcacgatctcagctcactgcaacctcaacctcccaggttcaagtgatttctttgcctcagcctcccaagtagctgggattataggcacccatcatcatgcccggctaatttttatatttttagtagagacggggtttcaccatgttggccaggttggcctcaaactcctgatctcaagtaatccgcccacctcagcctcccaaagtgctggggttacaagtgtgagccaccacgcctgggcttctgttcacatatctaaagctgctcatcactgcagatctcaacaccatagcccagtgttttgcaaccagagagagtctatcccctactcctcccaggggacatttttgattgtcatcacttgggggtgctgctggcatcgagtagaggctagtgatgcagctaaacatcctacaatgcacaggacaatcatccgcaacaattatctggcccaaaacatcaatagtactaaggtccagaaaccctgccatagcccaagcaaacaccagaaggattcgtgatgcattttagtaactttgcccaccaagactactgggcagcagtcaccagcacttcagaaatcctgggtaacaaatgctagtaaatttccagaacagatgcaatcataagaattggcaagcaagacttttctttgctcctatcatgaaacataagaacctaaagtcacgtgcaagcaacataaaattgccatccatattctgtgatacttgcatattctgtctagaaattatacccaataagaacatatataaatttaagaaagaggcaaccctactctcatagttaaaacacctgaacagtcttaccattattatcaactaaatatagcgtaacctttaacatttcctctgccttaatcttttttttttttggacagggtctcactgtcaccaaggctggagtgtggtggtgtgatcacggctcactgcaggcttgacctcacctgggctccagcgaccctcccacctcagcctcctgagtagctgggactataagcctgtgacactacagccaaaacaacaatttttttttttggtctccctatggggcccaggctgcttgcaaactcctggggtcaggcgatcatcctgcctcagcttcccaaagtgctgggataacaggtgtgagataccatgcctggcctgtaaacacttttttttttttaacactgtaaaagtctcaatgtttacaatttgggctgctgtcttgaaaattaagggattctcttgagcatcatttttatatgagattcattcattcttgcctccccttgactttttactcttctactaacagaatcacaaaaagtcaggcatattggaagaggtggttggaaaccaaagatgaattttcaggagggcaaaatggttaaaggctgagagaagcagctggttaggctgtaagccactctgcttttggaaactcattgttctgcaagggaactaaagatctccattcaaatccacagctttgtaacctgctcaaggaatctgactgtacttaatcagacctatggcttggctaaaaacgtgtgcccggttgggtgtggtggctcaaaccagtaacccagcactttgggaggccaaggtgggtgaatcacctgaggtcagaagttcgagaccagtctggccaacgtggtgaaacccatctctaccaaaaatacaaaaattagccaggtgtggttgcacacacctgtagtcccagctacttgggaagctgaggcaggagaattgagaattgcttgaacctgggagacggaggttgcagtgagccaagatcgtgccactgaatcccagcctgggtgactgagactccatgtcaacaaaacaaaacaaaacaaaacaaaacaaaacaaaacaaacaaacaaaaaggtgcacccagctggtgcagtggctcacacctgtaatgctagcactttaggaggccaaggcaggtggatcacctgaggtcaggagttcaagaccagcctggccaacatggtgaaaacctgtctctactaaaaatacaacagttagccaggcgcggttgtgtgcgcctgtaatcccagctactcaggaggctgagagaggagactcacttgaacccgggaggcagaggttgcagtgagccgagatcgcgccattgcactccagcctgggcgacaaacaaaaactccatcttaaaaacaaaacaaaacaaaaaaagtgtgcccatgtaaatgtatgcatgtttaaatgaacctgaacctctgagttgctggatttcttctttgaggtttgatttttttttttcttaattgcaaattcttgagttgagtacagttattgtgcctgaggcatctgcacacttttttttttttaaagcaactgatttggggaaaatatgagaaagactaatattctttaaaaatctagtttctggcctttaattaaattggactaaaattttatttttaataaatctagatataattgtattaaaatgcctttcactgattacttctgctattctatttttttttaattggtaaagccaggttctcactatgttgcccaggctggtgtcaaatgtgtatctttgtgaatatactaaaccactgaattctctctcacacacacttctatatggctctattccctagtctcatcacattttaagcaacctaattatctgagtgggctttctagattgagaccattaaactacacggaaagatgcttgtccatgtcctgcttcactctgcctctatcaaagtgtgtatcaaacacctcggaatcaatggctgccatgacatggggcacaaaataacaggctgttacctgtcacatctatggtcagtgctgacactagttctcttgacatcattagcaagcatgctacaacccgggcgagagtagaagtgcatcctctccatcttcaaaacacaaaggtaaaggcctgaggcttgctctataaggaggagccattacccttttgccctgttcccaaatactccctggagctttagtttcatttttgtacagcatgctactactgaggcctccaactgaagtatgtgagttcatgttcgggttcacagcaagttaagttcacagtttaccccaagctttgtggagagttaaatattaatcataagtaaaaatcccgttagtgaattataggataccttgtaagtgtcatgtccattacaaacaagtaacaacagaggcatgagaattaagctaagctttgtttcttctccccttgagatcaatacaagctactctgatttacttcaagtatgtattgcattcattctatttggtgctctatcacccagtaaatccctattcttcctttataattactgatacgccaacttctctgcaacatagtaggtgaaaacttttgttccgggctgagcactttctcttctccatgctgccaaaattccttcctaggcaggcctgagagactcatccctctcaaggacaatgcagatatggctagaagcaacctgagcaagccactttgttcctatctctgtgcccccagcaaccaatgccatgtctggtacctacaagtgccttgtggatattggtgaaatgtatagcaataaatcaaatggtacttctcccagattaattgtcaccagaagaagaaaaataatttaattctgccaaggtcaatcacttagcccaatataagcaatattcggatcaaaccttttagcttttatcatcacatgagacggtgaaagagccatctgtatcagtgtctctatctgttcacttaacagaagaactcccacaaggcttaaaatacctgcaagaaataaaactctatcttgaaatgcagtggcatctaatactatcttatccaattttcagctggatttaaaatttaagtgcagatatttcaatatacagtgtatattcacacaaaaaaaatttaagcaagaaatgtttcttttaatcataacataatgttctctctaaatatcagctttattataccaatagatatggataggttacatttatgccttttataattaaaagtcaacttattggtttacctttaacattcctcattagtagtaaacattagtttgctaatgtttcaaatgcaatggaggatcggaatgatgatataaccataactaagagagcaactaaggttaattgagcagttactgtataccaggaattatgcaaagtgtttcctataaattaattaatttaatcctcacaaaatagttaaatattggataggtcttattaatccctattttacaaaaagaagcaatgaggattcaaggttatttgatttatacaaatttacacagttagtagcttgtaaggcaaagatttgaatctggacagcttgagtttgtaaattgaacacttactgggcatgatggtaagcgtttaacataagttacctaaagtcattcttacaagaaacatgcaagataacattaccatctacactacacacataaaaaacaggttacttaactggcccaaggtcataaaaattctctcaaacactatactagtctatctctaaccaaaaaaaaacaaaccctacctcaaaagaaatcaacttgatatggcagtatgtgaaatagaaagaacttcacagtcaccgtcttatagtgagaatcaggggttagcaaatggtttactgaaaaggccagatagtaaatgttttcagttttgcaggcaacacaatctcttttgcgatcctcaactctacttccaaaacatgaaaacatccatagacaatttttaaacaaatgggatgggctgtgcctaataaaacttttgtgtagaaaacaggaaaacaggctatttttggccccaatttgctgacccttgatcattactcttatttgtggacccccgatcatttttctattttttttttttgagacggagtctcgctcttgtcgccaggctggagtgcagtggcgcaatctcagctcactgcaacctccgcatcccaggtccaagcaattcccctgccttggccacctgagtagctgggattatgggcacgcgccaccatgcctagctaatttttttgtatttttagtgaagacggggtttcaccatgttggccaggctggtctctaactcctgacctcaggtgatctgctcacctcagcctcccaaagtgctgggattacaggcgtgagccacagcgccagcctgatcacttcaagtaaaaattctaaaaattcagaaatgcacagtgtaaaataatagatgaatatatgcctatatcaaaggtatatgcatttacaagggaacacaggttgaaatgaatttgtgtgtatttataaagaaaataaaaagtgtaattttgacatgagtgtagcagaaatatcctggcctatctaggtccaaattctgatttcatcacttaaccagttatgtgacccaggacaatttattttattctttttttgagacgaagtttcgctctgttgcccaggctggagtgcagtggcacaatctcagctcactgcaacctccgcctcctaggttcaagcgattctcctgcctcagcctcctgtgtagctaggattacaggcgcatgccaccacacctggctaatttttgtatctttagtacagatggggtttcaccgtgttagccaggatggccttaatctcctgacctcgttatccgcctgcctcggcctcccaaggtgctgggattataggcatgagccattgcgcccagcccaggccaattaaaaaaatttttttcggccacgcatggtggcctgtattcccagcactttgtggggggcggggggcggggggcggggggtgccgccaaggtgggcagatcatgaggtcaggaaatcgagaccatcctggctaacatggtgaaaccctgactctactaaaaatacaaaaaaattagccgggcatcgtggcaggcacctgtagtcccagctactcgggaggctgaagcgggagaatggtgtgaacccgggaggccgagcttgcagtgagccaagatcgcaccactacactccagcctgggtgacagagcgagactgtatctcaaaaaaaaaaaaaaaaaaaattcttggccttagagatcttggctttaaacggggaagtaaaatttccaccacacagcatagttacaaggtttaaagacagagaatcactgctttaaagcacaagaggcctgttttcccggctacttgggaggctgaggtttgaactcaggagtttgaatccagcctaggaaacatagcaaaatcccgtgtcaaaaaaaaaaaaaaaaaaatttaaattacattaaagggcaagagtggtgaccgtgaaaatctatatctgcaacaaaggcttcaaaaatctgccagtctcccaggaggtaaaatgctgtctgctctgccccaacgatgccttccacagtagcaaagagcctagccatcagcaggggtacaacgaatagttgctgaataaatggaacataaggaagaaatgtccagttcctctggacagggcacaattggctagattaaataaaagattatgccatttattacaatacccatttcaatcagaatttagaatttatggctcaatcaaaactaccctgatatctctggtttctgaagtacaatcccttcttgaagaacagaaaattaggagcaagtatctaaatacaccactgttgtactcaaatcggtaatggcttattccactagaccaataaccaataatatccaagtatttttttaacaaccaaagatgacaataagcccccaaaaccagatagatcttgcaatcgtgtgctcacttttatttttatttttttgagacagggtcccactctgttgcccaggctggagtgcagcggatgtgcttacttttaaacaataattttattctactggaatcagtgacagagaacagacatcttctcatttgggtatcatcgattctaacacaatatggcagagaagattatgactacgctaaaagtgtcttatttttcttccctccatttctttccggttttaacgggttatgaaattattgagttttttatgaagcacattaaggactggtatcagtagcaatatgttggtaatgatgacaattttcttagaaaggatggctgtaaatcacattttgttccaggtactgaaacactaacactgaaaacaagattgtaagcctccctgcagtatctcatctttgcaagtcacttctaatttttatgttgaacacagaagcaacctacttgtaattagagttttacaaaatgagtaatcacctatggcgttgccattgctctcaattagggaagaaccacaagtcaccttttgtaacagtgaggaggaggaaaaggactctttgcagctgacccctttaacgttaccctctaaaacatctacttctttactggaattagctacaagcacaaaaaaattatctcgcatgggcacaactgaccataacatgtttctgttaggccccctttcccaggaagacttgcctcaattagagcttttgttcaggagtttgaggtggaatgaatggacctgcattaaagattcctctatttctggggcattaacagttgctatctctcaatgaccaggtatcttgctttcagaaggttgcttttgttgctcttcttgccaacaaaattattaacttgttattttttaaggttcatttcttttttgcctttagcctggagtgttttgtttatgaaattcttttaactgccttcgtctttctacaggaaataaaacaatacaacatctctgtgttccgtcttaatatcaaataatactacctgcaaaactcaagcaaaaagaactggactaatgcagacgataatgagaccaatttatctcaagcaaattgtcttgttctagaatatgggcctaagtttatgtggcatcctctcattgtactgcataactgatgtcactccttgttcacctgttacctcaacagtactagcatcaaaacaaaatctctttattgtctcctggaaaaatctgcagcgcacagtagcttctgaattaatatttgttaattaatcacctgcagttaatgcccatctttgccagcctggcattgaaggtctctatattttggtcccaacctaaaagacatctgctctagcttaaattggaccaatcctgtctcctaaatatgcctttccatggcaccacatttgttttgctagtcctgatgactctacagcaaaatccactggtagacacaccacccacccacacttttggctctagttcaaatgtcatgctctccatggaaccttctctgatcaatccagaagttccctcttactctcggaggcaggttctgtgttcacatttcttacaacacagatggctttgtacttctttgacttctatttcctaagagattttaacatccactagggttagctggtctgtgtgtgctcatcatccattccacatggcctagcaaaatggcttgtaccaagcaggtgctcaaaatctaatgtttcaagtaaaatgggacactaaactggttctattaaacagcccagcttgatggagattcaccaaggactttcagtcccactgcaggctgctagctgctgtaatttgtattcacacttcatttaggtttcgagaagagaagccctgaaaagctgtccttccctgctacaggcatcaggctaacaagttcatttgaccagatctgccatagttggtcctaacagttgtatgaaaaacaccctgagaaagcatgtctcagtatttgaaaaatggtggtttaaacaaaatgcgcatttactagcacatttacttatgtgctaaagtgagtaagaaactgtcattaagtagggaatgataaacttaatccatcttgcactctgttcttttttttcaaagaacatgtaaaactttcaataaattttaagctaacgctgagtgtttaattcagaataatctcaattttaaaagctcaagttaaagaaatgtagaacctcaaaaatactgtgttaagtgaaagaagtcggacacaaaagaccatgtattatatgatcccacttataataacagtccaaaaaagggcaaatctatagagacagaaagtagattagttgttgcttggggctagaggtgagtagagggcttaactgggagtgagtatgtgtgatcttactggagtgacgaaaatgttctaagattagattatggtgatagttgcacagcttggcaaatttcttaaagccgctgaattatatacttaaaagcaaatgaaacttatatgtaaattacaccttaataaggtaaaaaatgcaacaaagggaagaaaatactatagtgacaactatgaatatagttgagggagacaaaatagcccatgttaagctctaatagaacaataaatctgaaatcattaaactttagcaaaaagtgagagaaagccactttttgtaaatgctgtaacatttgtggttgacctttataagtatttgcagtacattaaaattcagtaagtacatattcattcaatctagctctagaagcatcttttactatctgccaagcagatggcagatatgaaatgcagaactctttaaggaacaaatgcatactctttaaggaactcaatccaacagtttactcgtttctgtaacatttggtcatttaatatcaactgaatgtttgtttttatttcatggagacaagtatgacctttagttcttttagttcacaatatttgcaacacaaacattaattcaatagagaaagtctaagacattaatactatatttacttcttgaagaaagcactgccgtacttcccaataaaacaatgtaaactcaacataaatcacctctgttaaaattcatagcataaaataatgcgatactcaccaaatctttttttttttttttttttttgagacaatcttgctctgtcacccaggctggagtgcaatggtgtgatctcagctcactgcaacctccgcctcctgggttcaagcaattctcctgtctcagcctcccaaatagctgggattacaggtgcgtgccaccacgcctggctcatttttgtatttttagtagagatgggttttcaccatgttggccagactggtcttgaactcctggcctcaggtgatccgcctgcctcggcctcccaaagtgctgggattacaggtgtgaggcactgtgcctggcccaaatctccttctttaatgaaatctaatcacaactactcactcaactaagatttatcgaaactacaagccaggcactctgtgcaatactgaataaaatcaagtccttaccctcaaggagctcatcgtctaggtggtaacagacaatattatataacaaacactcactgccaaaggaataccaaggagtcacctaactcagtgtttgtcaaattagatgactacctggttgggcggagtcttgtagaattaacttgggatttgccaagcagcatatacaaggtacaaaacaaactgtataataaagatttcacattatttgaaattgtttgcttgttaaaccaaaaaaatttcacaagcataagaagccttttggaaaaaaaaacatgtttttgattggggaaggcagtggtgctagggtggatatttccaactctggtattacgctttcttttccttgggggtggggggaatccaagcaaatggtggattacctcgaaccacctcttccacagactctgtggtggtggtggtggtggtggcaatgctggtggttctctctgtggcttcttcgtagggttcctcagcctcttcctctacctcatcaccatcctcatcgtcctcgtcatcatcggcttcttcttcttccacctcagccacttcttcctcctctgctacttctactactttgtcttcactgtgaaggcaaacacaaataacagaaaaagtcaattaaacacatttcagggaaggaaaagaaaagtcgtccatatggaattttggcaatttgagaagaaacacacccaaaacttcaattcagcaggtctaagtataaatcccagctcagtgggtctgcaaaaatttttatccttggggacagttcttagtttctgcagttgctaaaaggggatgccatgagtctaaccacaggacattctggaaaagggaaaattacggagacaataaaaagatcagcggttgccagtggttcagggggagtggggaagggatgaataggtggagtagagaggatttttagaaactactctgcacgatactgtcataagtaataatagatacacagcattaagcatttgtcaaaaccaagagactatactacacaaaaagtcgcctctcatgttaaaacaggaatactggttaataatagtgtatcgatattggttcaaacgtaccatactaaggcaaaatgttaatccaggggaaactgttggggagtggggaagtgagaggtagagggaactttttgtagtttctgcttgaattctttgtaaacctaaaactgctctgaaaaatgtagtccattataaaaagtggggtggtggatatcaaaactgagtttgccgtattatgggaattacttctcatagtgcacatacaagagccgcaacgcattgcacggtagcggatactcagtatatgctggtggaaattggtttaaaaactgcaactgagagcttaaactggacacacaggtggaagatgaagctgacttaagtaaacctgcaatgccctgtggtcagggatgcctgctggaactcacacaggtggaagatgaaactgacttaagtaaacctgcaatgccctgtggtcagggatgcctgctggaactcacacaggtggaagatgaaactgacttaagtaaacctgcaatgccctgtggtcagggatgcctgctggaactcacacaggtggaagatgaaactgacttaagtaaatctgcaatgccctgtggtcagggatgcctgctggaactatttagttgcgtaccctatggttactaactgcttatgttttgtagaaaaccaaatatttcagtggttctcaaatttcagtgagcatcagaatcacctggaaggcttattgaaacacagatcacctacctgctaaatgtggtggctcatgcctgtaatcccagcactgtggaaggctgaggtgggaaaaaacctagaggccaggagtttgagaccagcctgggccacacggtgagaccctgtctccaaaaaaattaaaaaaaaaaaaaaaaaaaagccaggcatggtggtgtgcacctgtagttccagctactcagaaggctggggcgggaggattgcttgagcccaggagttcgaggctgctgtgagctatgactgcatcactgcattccagctagggagacaaagacactgcctccttaaaaacaaacaaaaaccagccaggcatggtggtgtgcacctgtagttccagctactcagaaggctggggcgggaggattgcttgagcccaggagttcgaggctgctgtgagctatgactgcatcactgcattccagccagggagacaaagacactgtctccttaaaaacaaacaaaaaccaacacagatcaccaggtgcctgtggcagtttctaatgcagctccagagtttctgaatcatgaggccttggtggggcctgagaatgtgcatttcaaattcccaggtaatactgatgctggtggtcaggggaaaatattctgagatccactgcaatatgctgagaataatggcaagagataaccagtaactcagtgaaattgggaagaggatcagaaatatttatggtattaaacatttacatgctgatgcatcatagtttgtaaaaaataagcaaatttggatggcaaaagaagggcatgtctagaacaaaattaaaaaggcctattaggaaatccttgtggaaatcatgtacctgtcaaggcaggcatggttgacagcatttgaatatctaatagtaaaagcctatcgtataccacctagcaggactagaggaatagatgtccttgatcagatcacaaaaccaatacaggagaaagacctagatgtggcagggggtttcaacctttctggggcaactaccacaggtctattcgagaagtaccatagtaatagaattaaaagctgctatgctgacattataatgtacccagaaggaaaaaaaaaagcgagagggagaaagcagaagggaattattaccacagagctgattctggccaacaaggagaagctcatcattgggaaaagtgataggaacccgggatttgtagccacaggaagccttggactcgtagtgagagcacagcattatgtaggaaatcagattccaaacacgtgagacaagcgaacactatgattccatgatctacgacaatagaaaggaagactcctccataaacctgaaaggctttcaaagtctaacaggaccgccataagtagttttgctgagagtgaaagggaaagatatgtaaagagattaatccatcaatggcaggaattctctgattacctcaggatttaaagcatgtgttacacaagttgtataaagatgtgtatgatccccatggaacacctgactctgattacgtaggatacaagaatagtataaagggcgtttataaaagtttcaaaaaaatgtgtatgacccccaagtggaacgcctttctaactctgattaaatatgatgtaaggatattaagtgaagacatccgaagaagtttagcatgtggctaaagaataaaaagaaactgattaagcagaataatttattaatagcaacttactcatatgttaataaatgaagtgttaatacagagaaaatcctaatcagttattgtaacatttccacaagactaggacgaaataggtgaaaagagaaacagaaaacactggcactgaaaatcagatgttggaagcctttatctcctcgtagaaataaatgaggtgaaataactgacttttttttttgactgcccaaattattgcacgaaagtttactacgtggggctacatttcaaaagaatccttaacagttgctcagctgccctgagcttctgcctttgcatttttctgtaggatctcactgttgtattactggtgaatcaaagaaagatgacctgatgcatgtcatcagttaatttaccgtgtttgagatctcttacttattcaatcaaatcatgggcactaactagcgctgttttccaatttaagtggaaaattcagggaaagtcaggaagaaaaatcaaaccagtattctctttaaatcatgatgtatacacgtgatcttgaaccatgactggaatgacgatgtccaagtgtaccatccagggtttggacagcaccgtgtttccaggtgggatggtgaaaacatgaccctgggtatccccaggttccttctccaggcttctttgttattacttggatgtggcccttaaagctctgaatagaaaccatgtttgtaaaaacagctgtttagtgtgatctgcattctggtatgtgtctagccgtgaaaaagagtgaattatatgcccatcatccatccctgcatctgcctgagcaatttactggcataataaccaggaacggagacacgtaataaatagttcaaccggctaaggaattaaattacttggcctaagagaactcaggtccaagttcttattaccatagctttgatttctggaattaaatttagatgtccatgaattcaattattcatttggacactatttaaaacaagagcacacggttttgtttgaataatgctgcatcttcccaaagaatgccaaacacaacaacattacaacttttaactgcagttttcatgaacagctagaaacactgaaaggaaaaaaatgacttttccaccacttcttcaaatgctggacagactgttgtcctgtggacttgttttgaaaagctcatcacagtttaaggagttgcaagggaggaacagtttatggaaatataaagctgagcatcataaaacaatttccttacaaacaatcaaataacaactcacaataaaataaacgcttggcaacatagtggaacattcataccacattcgcagactttagtggctatcaatttatagtgggtggcttttacagcttttaaacaccaataacaaacatttttacagaacaagggaaccatctgaaaatgctgaccatccccagagtatctgaatttaataaggtcaaagggacattcctacgaggaaataaatcactgatgataaaattttatgtgtcagcatgcgagattttacttggatgaaggagaaatgacatcacaaaggtgactctccttctgtttctaactaaagctgaccttgatataattccacatgcaggtgccgcctgataagtccctttacagagtgaaagattttgattcacacaccaattttcatttctgtttattaaagtcatgccaaaaaagtcaccatttgtattttctaagaaagccatatgacattctagaaatggcaaaattatagacagtaacagatcagtggcttggaaaggttaaaggcaagagagggtcgaacaggaggaacacagaggatttgggggatagtaaaagtactcagtatgacactacaatggtgggtacatgtcattagacagttttccaaactcacagaataaacaatgctgagagaatgctaatgtaaactatggactttgggtgataataatggtgtcagtgtaggttcactgattgtaacaaatcgctctaagggggacgctgataatgggagaggctgtgcaagtgtatgaacagggagtatatgggagaatctcagtaccttctgcctaattttgctgtgaacctaaaactgctctaaaacaataaagtctatatttattctttcacagtctctgttaagacggacttttttcttcttgctacagataaacagggaggaaatgacagagagaaagctctgattctcatggttatgtgaatatggactatcatgagatccaacctacttgcactgatgagggaagagggaagacaaccaatgtcagttcctgaaatgcaaccaaccaggggaaagctcagcaggaagaggttcagactcttcctctgtggatatgaaaatgggaaaaaagagtctagaggctcccagagtcagaagagagagaaaatacagtagtttttttcaagaagataaacagacggttctccttctctctgtctcaactctccaaactgccagagtctaaactggaaggtacaatggctggataagtcagtttgtccgaaaggaaagcagtttttgaaattactgctactaaattaggaaaatgtttccggggagggagggcaaagtaagaaatagccagtacttctcccgcataaaggcactgttagaagcgaaacacaaggggacacatcacctaattctatttgaattaaatatgaaaacaagcaaactgcaggcaaatagaactcaggggaaaggccagtaactggcaggggccaggagagaggattctaggggccagcaagtctctgtgttctggtccggatgctggctatctagttgtgtggtcttaaaaaactttgcttacttgcattacctcttatgtgtacttctctctaaataaatcagtaaaaaggttgaaaagggtttcttgttacttgcagctaaaggcataagcccacctggggccctaggtttaaggcctccagctttaggaagataaccacatgactggactaccaaaaattcatgactcaggcctgaggaggtggctcatgcctgtaatcccagcacgttgcggggccgaggcaggcagatcacttggggccaggagttcgagaccagcctggccaacatagtgaaattccgtctctactaaaaatacaaaaaattagctggacgtgggggtgcacgcctgtaatcccagctacttgggaggctgaggcatgagaatcacttgaactcaggaggcagaagctgcattgcactccagcctgggtgacagagtgagactctgtctcaaaaaaaaaaaaaaaaggaataaataaataaagtcatgacacagctgattaagaatgagctataaatcacaatcttgatctgaaattaggctatatcatcattcttacacatttaatgaatacttattctgagtgagacaattcacactaactgctgtatgagtaacagacatactgcagattaaacgcttcagaaattcaacagagaagtgattgttgcgagccagaggcatctgagttggccggaagtgataggtggctgtggggatgaggcaggaatatccacataatgcacaagtggaataagaagtaaataaaatataatgaaattttacacaggcactgagttttaacagtgaggaagggtaaactgcagagacacggggattcaggtattttttttctttagccaatggataaatatttgagttgaaaggcatatgtacaaattgatgataatgagcaaaaaagtggcaatgcattcattcattcatccattgaatcattccattaagtacctctctaagccaacccctagtaattcaatcaacaatattcgctgtgctttaccaagtgccagtactattccaggtagtgaagataaagcactcaatttcttggaatctatctattagttggggaggtgtaatatgagcaagaaaaaaaattatggaaaagtactatagggaaaggagatggggctaattgctaatgaatgactatgatagatgtgtgccagggatgggtagcatttcaaacagggtggtcagggaagggccccacggaagagccatgtgaactaaaaatgctgaagtcgggcacggcaaaaccaagagagtgcatggatggctgaggcaggggtaagagcaagtgcaaaggcccaggtgtgaggaagagattagcacgttcagcaaaaacaacaaagggccagtgagcttagggagtagcagatgagggaggaagtataagatctggtggtggagacagacaggcatagtgttacccagtacggttacatttcttacagcaactggaacgactcaatgagatttaagttgcaatgatgtctctggctgctgggcacagaatggtctccagggaaaacatgaatggatgctgggaagctggacactgggccaggagctaggggtacactggaaagcaaaggtggctcacaaggcaagtagccaaaggccagacactgacctcagcacctgtataaatgcaaaattactgccctgataacaattacatacagccagaagacccaaaagagtgagtgctagtgtgtctagtgaggcagagattccaggtgtctagtgaggcatgactgaaatgtgacccaaagaaggtccgaagtgaatgaagtccaggggccaaagatagctctccactaggcagggtgggtagagcatgtgcaaaggcccggtgacaggagggagggaaacctgagcacctgaaagggaattggctgacaagaacagaaagtgggctccaagaatggcaagtcagcagtggcacagagcaggtcttggcaaactgcaacccgcaacttgttcttgtacatcctgtgagctaagggtgggctttgcattttttaaaggattataaaaagaaaagaaagggggtaaaaatgacagcaatatgtgacagagattgtatgcgacctgtaaggcctaaatacggattgtaaaaatgaccatttaaagtcaaaccaacttctctcaacacatgctcctgtaaaccctgccccacttacgttagtgaattagtgaatttctaaaaaaaaattactgaaacaagcaaagagatccgagaagcactaaagcccagcttttgtgtaaaccagcagttcctgggcagaacctttaaaagacaatctctctttactctgctatctcagtacacacttagggtaacatgaatatcctagcaatagagcaacaatctaaacaatacccctgggacatgatataagacaaatccaaggagtggacagtttataggaaaactggtacagcttcttcagcaagtcagtgtcaggatataaaaagtgctattctgaatcctaagaattaaggatgtaagatgctggccctggtgccggataggatgtgaaatgcataacctgtgaaggacctttctggaactcagggagaatctgaatatggacatggtatccaatggtactaaaaatttatgttaattttgtgggtgagatggtatcatctggactctgtagaaaaatgttcttagattttagagacatatactgacatcttaaatatgcttcctatctgaacttttctttaaaatatcttggcatcataaaaagtatgtttaaagggggaaaatgatattctggcaagacttaaatttggaatataattacagtaaaaggctaaattgcttttttaaaggctatcttggaggcaagaaaagtcatatattatcaaaagcagattattgttctgacagctttatgaaccaactagaattaaggagaagcacctaaggtcataaaaagttttggagtcattttaaattcttgatatgtgaaaaagtttggttaatcagatgctaggccagaaaactgtgaacgagcaaattcctcatgtccaaaggtttagctgctactaaggatgggtgatccatatatattttgggtggagagttggaagtatatgacctttggctgtctaacaaatatttgagttccagggtctgctctggagtctagggatgctgcagagaataaagcagacaaaattccctgccttcctggtatttacattctacagggaaggaaagatataagaaaactaaaacaacgatgttacactagcacattacaaggtgacaagtgttacagagaaaatgaaagcagcaaagctaggggtgggctggggctggtagttggccgggctgttgcagtttctacagaagatggtaaaagaagatgccctgaaaaggtgtcaatgcagcaagaactatgtgcctggcatctccttccactgtgtccatacacatgagaactactacacagctataggtggtctgtgtccaaaatggctacaaagcaacctaggaaagtcacaaagtaagagaaaagcctggtccttttcttttgggggcactttgtgaagacctattccttagaaagaagagagaagctgcatgcttctgggcttctccccctcttttttgggaaaaaataattggttctgttaaggaagtgtatcagtctgttttcatgctgctgataaagacatacccaagattggggagaaaaagaggtttaatgggacttacagttccacatggctggggaggcctcagaatcatggcgggaggtgaaaggcatttcttacatggtggcggcaagagaaaaatgaggaaaaggcaagagaaaaatgaggaagaagcaaaagcagaaacccctgataaacccatgagatcttgtgagacttattcattatcgcaagaatagtacagagaagatcagcccccatgaatcaattacctcccctgggtccctccacaacatgtgggaattctgggagatataattgaagttgatatttgaatggagacacagccagtccatatcaggaagcaaaaacaacaaactctgctcctccttccagcacgctccccaaaatgcagcaataccttgtcctgccccagattcgtaagtggagccccattcctaggagaaaacagatacatctgcaccactgatcctcagtggcagaatatgccaggtatctgtccaggagaagaagccatgtggctcaggctacagggtttatagcccaaggcctcccttgcctctgtgctctgagggcttgaagtaagtagaaaagtactttaaattgtatcataaaggtaaagatgatgtagcttcttgggttagccacaacatttaggaaaagcatgttctggagaggtaagacttttagttgattttccattagtgagctaacatttttcctcttccaacaagcccactttcttgcattggtaagtattaagtatctttttttaaagtatctgtggttggttggcatctgagaaatctgtagggtcaaatatcaaatagacacccctagcacaatgccacaaatgcacaagggatgaggctatgaaatttgtgaattcttttcctttctcaaggaacgactacacttacatatactccagttaattgtatgttctagttatgtagatcctagagagaaggtctagtgtggtgattaatggtgactttccagagctcagccacgtgggtttcattctcagtgctgccacctgccagctccaatgtgactatgaacatgtcacttaggctgctgtgacttggtttcctcatctttaacatgggatggaaatattaaccacctcaggggatggtgtgaacagccaatgatgtaaataacacacttggaacagcacatgataagagttaaatactgtgcctatttactgtttttaactacagcttaaatgtatacttatgacatttcttttctttttattgctattaggttttgaaaatggtataaaaatatcatttgtttttcacaggtaatgtttttcttggggcttattattttagaaaaaaaaaaaatatatatatatatataaagagctatcctttactgggcgctatgcctagtaagttcccaactgctgactataggctcagagccctgcagagatgggatgtaaacaagcataaaacagtgttttcagtgaagtgcatattaacaataatgggctgaacaaagaatgttcattggtggagtttgggagggacagactgaagaataatctgttgaagaggtaacaggtaaactgggacatgatgaatgaatagaaatctacaaagaaggtagcaaacaggacactgtagaaacagggaatggcacccgtagcagatgaagagtgatatggtttggctgtgtcctcactcaaatctcatcttgaattgtaatcctcataatccccatgtgtctagagaaagacctggtgggacggaattggatcatgggagtggtttccccatgctgttctcgtgacagtgagggagttctcaggagatctgacagttttataaggggctgttcccactctgctcctcgctcttctctttcctgccgccttatgaagaaggatgtgtttgcttccccttctgccatgattgtaagtttcctgaggcctcctcagccatgcagaactgtgagtcaattaaacctctttcctttataaactacccagtcttggttatatctttatagcagtgtgaaaatggactcatacaaagagtgctacaggaattgccaattctcagtatggtggaggagggggtggactgcaggaagggagctgactagctgtagctctgctcttttatgaagggctttgtttcacaggctgaggagtctggaccatcatctagatgcagagcctagtagaaaagcctgaagcagaagagtggcaaggttagttgtattgcaacaaacatgagctagcagaagcatggaggacagataggtggaggagcgacagttgggatgtgaaggcggtgctcgtgaagcctactgagaacttggataaaataacagcacagaactggtgactggggatgaagggagtgagtaagaggaggaatctgatgctttgagttggagaatagttactaatggtaacagaggatacaggaggaattaagaaatggagctaatgggttcagctttgatcatggtagacttgagattctgtaagaccccgctggagaggcatacagcagacagctgaaaacaaagaacaaaaaaatctgagccactaatacacaggcactgcttttctatttccattaaataaacagtgctgcactttgttgttttttaaactaaagagctgccattcctgaaagaccacagataatagaccagatgcccactcactttctgcatggataatatgtcccactgtgataccattatttaagtagaaacaaaatctagccttatgaagtctaattataccattcctcctccttccttcccctctctctccctgcaagcataattcaagactgctttcccattcagagatctatgtgagaattttaaaacattgttgctgattagtctctctaatcaataaaagaaatctactatcggccaggcacggtggctcaggcctgtaatcccagcactctgggaggctgaggcgggcggatcttgaggacaggagatcgagaccatcctggctaacacagtgaaaccccatctctactaaaacacaaaaaatagctgggcatggtggcgggcgcctatagtcccagttacttgggaggctgaggcaggagaatggcgtgaacctgggaggcagagcctgcagtgagccaagatcatgccactgcactccagcctgggcgacagagcaagacttctcaaaaaaaaaaagaaaaagaaaaagaaaaaaagaaaagaaaaagaaatctattatcgattagatttgataaatctattattgactagagagaccaatcaggaacaatgtctaaaattgtgtatgaaaagccattcactcatcaaatgctagtggctgctaagtgtctggcattctgctggatccgaggctccaaaagggaaaaagataagctccctgtactcagagagattacattctatggggggagagaacgacaacgaaccaataaaatactaaaatgtgattcatttcagaatggaagtaaataggctgctaggattgagaataatgaagaaggggtgttttcttcagaaaagaatgatcagggccaggcatggtggctcatgcctgtaattctagcactctgggagacggaggtgggaggactgcttgagttcaggagtttgagacaagcctgggcaacaaagtgagatcttgtctccactaaaaattaaaaaaaaattagccaggtgcagcctgtagtcccagctactcaggaggatctccagagccagggaggtcaaggctacagtgagccatgatcatgccactgcactccagcctaggtgacagagcaggaccttgtctccaaaaaacagaatgatcaagggaattcattctggaaagatggcaacaaaactgaggctgaaggtgggaccttggaacatccattatagacaatgagatctgtcagcccgggggttagcaagctggggatattgacttgtgtgacactgagcaggggagagtcgggggaaagagaggcatggggtgatactgcggaggtagggaggagctgggtcaaatacactaatacctgtaaggaatgtaggaggtcaaacctgacaccaactacgtgtttgttagttgttacccgttatcaattatcctcagcatatccaaataaggcttcattgttttctctctgtgcacttggtttttaagcgtattggtaagccacgaacacaacttaaatttgggggttccaggatctgctttatgtaaataaacactctacatcctggctgctgtacagagaatggcttggtgtgggagaagaaagcagcgcatgtgtcagggagagagaacgagagcagagattagcaggatacggaaataactccagcaagaaacaatgggagtttagattagtgctggaaaagatggagataagtggataaatccagaattcataggatgtgcagaagagacgatgatgagttctaggttctcagcaataatccctaggagagggcataggaccattactgagatagaatagctttgagagaaccacattgaggactgggtagcaggggaattaagaactctcatttggacatgttaggattcatatgcctatgaaataactaggtagagtctggcctagagaaataaaccttggcctagtctacttacaaatggtatttaaagtcaagggcatggattacagcaatcaggaagagcgagccagaaagaaaaatagtataataattgtaaagagatagccagtgtcaggaatttaatggatgaaatgtcaaaacaaaacaaaatcagccaagacaggataattaaaaccacaaaggctagggtgggggtggggggtagaactggggggtgggcactcctaaagcctgcataaacaatgtgtaggaaagacaggctggaaatgacagtgacacacaggttactagacaaagggcttctgagaaatggcaaaggtaaccaattctaagaacttactaatcttaaggtgatttatagataaaagtcccatcctataaatgtctggattcttgagcccagagatattctgggtctgtctgtactggtattctgctgggcaggtaaaggggttatgaagagaagtactatcttacttgcctgtcaactaatactgatgacagagcaaaagcgtcatgcactttacagtcgtggtcatagccaaagattgcagatgtcctagacacagtatttgagacagagaatggaacatacatagccaagttactaatatacatgttgggtaagaagattcccaaatggaaggaaggtaaaaaagctctgttctagtacaaccatttgaggatagtatggagattcctcaaaaaactaaaaatagagctaccatacgatccagcaatcccactactgggcatttatctaaaggaagagaaatcagtatattaaaagaggtatctgcactcccatatttactgcagcactactcacaatagccaagatatggaataacctagatgtccaaagagactaatggatgaagaaaatgtgatgtgtgtgtgtgtgtgtatgtgtgtgtgtccgtgcgtgcatgcacgtataatgaaatactattaagccatacaaaagaataaaatcctgtcatttgaagcaacatggatggaactggaggacatatgttaagtgaaataagccaaaaacagaaagttaaacaccacatgctctcatatgcagaagctagaaaatgttgatttcatagacgtaaagagtagaacagaggatgatggaggctgggaagggtaggtagaaactgaggatagagaaagatttgttaaaggataccaaattacagctagataagaggaataagttctagtgctctacagcactgtaggatgactacagttaacagtaatatatgacataatctcaaacagctagaagcaggatattgaattttcccaacacaaagaaatgatacatgcctgagatgaatatgctgatcagtctgatctgatcactgtgtaccctgtaaatgtgtacaattattacatgtcaatttttaaaaataaaaatttttaaaaaggtaccttttaatgaacggtctatgcttaaaatgttgctaggtgtgtttcaacaccaatgagttatatctgaggttggaccataactagacgaggcacttagagatgcggtaactgtggtctcagcatcctgttccactgcacttagttccaccatcattgtattacagtaaatgcaatattgctatcctgtgactaccttgtaaacatattttcataaaaccaaagtgcttcattaccacttctgatatgtgtatgagtccttggctccaattttccaataatagtagctatacaattatgttgaaaaccatttgaggctaaccattaacattcaaatgacgtacaatgggaaacgaatgaatagtatattctaggagataaaagatcaaacctttgatatatcttctcttacttattagtagttagagtttaagatacaatatttcttctaaaaccatttcaaaaatataatttaaatataaaattgaagatcctaaaaaagtatagaagttttaaagtagaatgactttgctatttgaatacctatttaaatttctatttaaaatgtccaaaacagcccaaatcaattctaccttcatttttatagcagttttctaatcatgagacatcatactttctagtcctttttgcttccctaaaataaaaaaactcctacatatttaaattcataaataagaattatcattacttgattactaccaaaactaattttaataatgttctcaaccttatctaggatagaagtgcttaaggagccattacgtattattattgattatgattacaagacctacaataattttaaaataactaattaaaaagggaacatgttataatagccatgattatcaaaccagaggtgggagatgagtcattgagccccaaggagagtctttgtattcgacagtgtgagatgatgggtagagaagtgatttgactaagaaaaaaatcaccccagctggcgcggtgtctcacgcctgtaatcccagcactttgggagcccgaggcaggcggatcacctgaggtcaggagttcgagaccagtctggccaacgtggtgataccctgtctctactaaaaatgtaaaaactagctgggcgtggtggcaggcacccgtaatcccagctacttgggaggctgaggtaggagaattgcttgaactcaggagacggaggttgcagtgagccgagattgtgccactgcactccagtctgggcgacagagtcttaaacaaacaaacaaacaaaaaaaacatcccatgctgctggcctgctcccccaacaattccaatctacgcattttaaacaagtccactgtaaactttaccggcttgatatgcatttacaccaattagtcgttttggaagcaaataccgtgatacagattattgcaattttccccatgtttgaggtaaagaaataggctcaaaaagattatatatgagggtaaagcacattttaaacctttgaagatatttttgaagcaaagattatcttatttacttacaagtcttttctttccttgactacttggatgcgtctattacacctggtttctgtttccacccaatgtctttttaggcaggttagttctatcatcatgaaatcactgtaagtgcaatactgccctttccttcatgatgtcattcatctctttcccagtttgttatctaacacgtattaacattttagtatccaactacattaatctcatgactactagcattgaaagaactgataaaaagataaaagcaaacccttactgcctggtttgacaataagtaacagctcttcacaaaggctggcaattaggtcactaagcaaaaaatcttggaagaccaaattcgaccaacagcaaacagtggtctcaaatgtaaaagaaaacttaggttatatgctacgcttacaatagcaaattatgtatactgcttgaattactattgatctaaataaaatggtgctatgctataaagattattttcaaataatttctaatatcaaactatacttttgaatacccttggcaaatcttttccagaattacacattcctaaaacaatgagccaatccacaggcacgtgtggcctactatatgctcaacattcacttctctttaaaacaatttacatgacaaaacaaagtacaacagtgaacattcatcagttgcaccttcaaatgtctgacaacacaatcagatgatctgtgtgtcctttacttattaaattgataacaaatagaaaataaaatgtagatctgaaggaagcacttaatttttttaatttgctcaattgcaaaaaatttatttatataaatatataaaatgaattgctatattaaaagaataatacaaattaaaatactataaataataacttgactgccttacaaaatcaatttgagctactgtatttacagattgagtaatccttatccaaactgcctgggaccagaagtgtttcagatttcagatttttttcaaattttgggatatttccatacatataagatatgttggagatgggacccaagtataaacataaaattcatttatgtttcaaaaataccttatacacacagcctgaaggcaattttatacaacattttaaataatttttgtttcagaaaggaagtttgtatacattgaacacataaagtcacataattttctacgtttgctgtcatgtcagtgctcaaaacattttggattttagggcatttcagattttggattagggatgctcaacctgtattttatggtaataaaccgcatttctttaaaaatattgtacattcttggctgggcatggtagcttatgcctgtaatcccagcactttgggaggccgaggccagtggatcacttgaggtcaggaattcgagaccagcctgaccaacatggtgaaacctcgtctctactaaaaatacaaaaattagccaggcatggtggttggcacctgtaatcccagcgactcgggaggctaaggcaggagaatcgcttgaacctgggaggcagaggttgcagtgagcccaaatcacaccactgcactccagcctgggcaacagagtgagactccgtctccattaaaaaaaaaaaaaaaaagctgagtgtggaagcaggcacctgtaatcctcgggagactgaggcaggagtaccacttgaacttgggaggggaggttgcagtgagctgagattgcaccattgcactgcagcctgggtgacagagcgagactctatctcaaaacaaacaaacaaacaaacaaacaaacagtacattctagagtttaagctaatgaagactgttctcccagtatctcactccatacaaaaatatatattaaaaattcaggtgatcatggctttggctaagtggcattagtctaccacctacaattttacattgaaacactggggatactgcaaatgttacctagtaaactaaaagtgttactttgtaaacagggagggcaaaaaaggaagctagttagctcccacttgggacagattttgttcactctctacctctactcaaaggaaatagtttgaacatctctaaattattttcgtaataattgccttccttccaaaacaaacatggacttataattttgctgagttccttgtggtaagttactggtactagtttaagccacatggctcccaagtaaagccaacagtttttggcttgatatgctaatatgtagattttgaggccacagtaaaattaattaactaattaaagggttatttttccatgtcacaatggagagtcctatctaaattaggggttttacactgaagatacaaatatccagatggtttcaacaagaaattaatgtttcggtgtactattgccagagaccagttaaaatcataagaatctgtattttcttcctcttttcctactatttttaagccagggaatttgtacagtttaattaaaagatactggagggaagaaaagagtccatgcatcagtagcttaggatccttagcactgaataatccaaccctccaaataactcttacaaatgaatcctacagtatttctcattcagcaatatcctgttactggggcaacctgtgccattaggtctcagtaagcagcacagtctcattgccagatgtagctcagacagcagcaactcaagccctgcactacagaggcatctcctcttccagccatcacctgcttggaaacaaaaacagaccccactggtttggccacacatctgtaatctgcttaaggctataaaagtgttttgcttttctttttgacatacatgtagtccaagtttattcaatacaggaatcgagcatttctaaataaggacctcaaaactggcagccagttccctcaaaagaaaatgcaagtttctgctattctcctattcgtcattttcaaatgagttctcctatttcagtatagacagtcagaaagcctcacacagtcctggaagctgccaacccagcattatgacagctgcttctcaaagccatgagccatttcattaaatccactcttacttgactcatccactggcaaagatttaaagctttaatttatcttttgtatgattcactttgcggccctctaaagttgttaggttttttttccttgagcatttaatatcatttctcaaaatgcaatgcagaaaggcagctgaaagattatatattcaaaaacttgtaactccagagatacaaataaaaagatatatagtcaaatacagcctctctttctctctcacctaattttaaagacaaagtactgaatagacataaattctcatgacagcctgagctcatcaggtaaggctatgaatgtttcaacatcactagctaagtggaagacggcatgtgcataatttattacatgattgaatgacaagttttcactaactacaaatcatgtatttgtgaaatgcaccatctataataccatctggttattattttctgagaaaagttctcagagcacaatgaccataattaaatttgcttttgactagatgtagcactgtgccacctacaaattgagcctgtgcaagcgttttatgatgactgcattgattattgttatcaagatttcaccccttggtctggcgtggtggctcatgcctgtaatctcaacactttgggaggcccaggcaggaggatcacttgaggccaggagtttgaaaacagtctgggcaacatagtgagacccctgtctctacaaaaaaaataaataaatcaaaataaattaggcaggcatggtggcaatgtgtttgtagtcttagccatttgggaggctgaggcaggaggatcacttgagcccaggagttcaaggttacactgatctatggttgcaatactgcactccagcatgtgtgacagcaagaacctgtctcctaaaaaaaaaaatcactttaatatagtatctggaacatatcaaatgctcaagaggtttagtgcccttcattacactggaggaaaaaggtgacattttgtacctctgcatgctcagatacagtttgtttttgagttggaaatatttcatacttcatcttttcttattcttacaattttcctttatttataatgtagccatccctcttctgcccatggaaataatgaaacatgggacccatcatgctatgttattagactcctgatgcaattttacttaattactgcatgtctagaatgatattccttagtttttcttttcttttcttttcttttttttttgagacagagtcttgctctgttgcccaggctgaagtgcagtggtgcgatctcagctcactgcaacctccacctcctgggttcaagcgattctctggcagtctccccagtagctgggattacaggcacatgccaccatgcctggctattttgtatttttagtagagagggggtttttccatgttggccaggctggtcttgaactcctgacatcaagagatctgccagcctcggcctcccaaagtgctgggattacaggcatgagccaccatgcctggcctagtttttcttttttaaagaccagttagttttggtgacactattaaccttaagttaacatgatgacgtaggtgtatgtgtttgatgtgaatgccaatgtgattcaactcaaatacttgttgagcacctaactacctaacttatagaaaattatgccaagtattttcctgcatcaggttgtacaggcctcataataaatgtaaattcttggtaagtaggataggctgttaacctttagaataccatcaggtcttggacacaattttacctttgagttctgagcacttctaactacttgtgggctgatattctcactttatccattcatagagaaaaagaaatttaatcgactaaaactcattctagcttgtacttaaccatgagtctgagatatggtatgaacctcgatctttttcctatattgtgttcctatgttacaaaatatttatcatccgaagaattatttcatcattagccatcaactatttaaaaactgtgctaaagaagacaaaataatatgagcatgaaagaatgatataattgcctagaaaggtgatgcaatagggaaattatcacatttttattgctgtgttcccaaagtactgcatcatctttcaagatggtttaaaaaaagtctgcatagtcccagctacttgggatgttgaggcatgaggatcacttgagcccaggagtttgcagctgtaatgcaccatactcacaccagtgaatagccactgcgctcaagtctgggcaacagagtgaggtcccatctctttaaaaagcatgataaaaagaagtctggagactcactgaatatagtcaaaaatcatcttccacatattggcaaataggaacaactgacagaaggaggcattttaccaattagataaaccagaagaagaatgaaattgatcacgtaagtaaaaccttaggctatgagccttcacatgatatcctagatgaattttctcaagctcaagaattgacaagtgagcaatgtatttctttctttctttctttcttttttgaggtggagtttcgctcttattgcccaggctggagtgtgatggtgcaatcttggctcactgcaacctctgcctccctggttcaattgattctcctgcctcagcctcccgagtagctgggattacaggcatgcgccaccacgcctagctaattttgtatttttagtagggatgggctttctccatgttggtcaggctggtctcgaactcccaacctcaggcgatcggcccacctcggcctcccaaagtgctgggattacaggcgtgagctactgcgcccggctgagcaatgtatttctaagaataaaaaggaaatatggtattctcatccacttagtcattcaacaggaaggatatcatcactcaatattatgtgacaaaaacattaaccatcattgctaaaatgatgtgacagtattccttgccattttatgatgcttatgcaacacattttatgtctgtgcaacacatttatttgataccattaggaagtggacaaatgcccaaggcaggaatctctctaaggtgattagaagagataatgcagaaaaaaagggggaaaaaaagactggcttgatcattttaatagctgtttacaaatccaaacttgaaaacattttattcctgagggaagatggctatattctctcttcaataaaattatgagctgtcaatgttttaaatatcttaaatttttacaataattaaatgaaattgcaagtataaaaaaaaaagaccaagaaatatgatgaacctaatagagatgtatttgaaatgtagaaccagtatttgtaagacggatatatttcaggttcgtgcatggcaggtgattagcagctagctgcattccaaaggataatgctcatttcagaaatccataccttcaaaactgggaaaatacagaataaacatgtgggtttaccatatttaaattcttcgtaaaattaaaatatttactatgttaactcttattaaaattgctaatagttatttctcactattcctttattcttagttctgtaaattgtttaccaaataatctaaaaatatgaaacaataataatataaacggcccactgtatctagatagtcaatggtgctggcctggttttctggtgtagttagagggcaaggtgacgtcttgccatatgtgacactccagcaatcaccagaactgatgaagtttaaactgggttcaatacggaattgtatattccaatgcacgcacacctgcatacatggccatacgcacccacacaagccaccccgagctgtattagttcatttgcatgttgccgataaaggcatacctgagactgggtaatttacagaagaaagaggtttaactggacttacagttccacatggctggggaagcctcacaatcacggtggaaggcaaggaggagcaagtcatgtcttacatgtatggcagcaggcaaagagagagaacttgtgcaggggaacccctctttttaaaaccatcagatctcgtgagacttattcacttcacaggaacagcatgggaaagacttgcccccatgattcaattgcctcccaccgagtcccttccacaacacatgggaattcaagaagagatctgggtgggaaaaaagccaaaacatatcactgccccccaaaccagagagtaacattaactaacctggccaacatggtgaaaccctgtctctactaaaaatacaaaaattagctgggtgtggtggtgaacacctgtaatcccaattactcgggaagctgagtcaggagaatcgtttgaacccaggaggcagaggttgcagtgagccaagatcacaccactgtactccagcctgggcaacaagagcaaaaacttcatcttaaaaaaaaaagaaaaagaaaaagaaaaaaaaaaactcttccaagttatacagtcttaatgaaaataagacacggtcaaaaggaatcactcctccagatcttaagcagctctttaaaaaaaaaatgttcaaagaaatagaaaaaaaaaatcatctaattatccagaaagatacatcaagttacctctcagcacacgctcaccagtgtctgcaaacctaaacctaaaagaatacatcgataattaaagattgtttcttaaaaaaaatgtgagtacctcctctgcaagaggaaaagtgtgactctacaacaattagagggtcttctaacatttcatttgctttacgaattcagcaacccccatggaccactgggttcaatcagattctgcagttccaggtgaggagcagctctgcctccagggctaggctgcctacctggctagtcttacaagttagctttccaaatgaattttcccatggaaaaaaatcttacccacgatggctggagtctgtgtattattaacattatgtacgtaattattattattaacattatgctacataatgttagtaacagtctggattatgctacattacagactgcataaataggtattttgaggtgatctgagaatatgaccattacaacactggagaaaaatatactcggtaatttacacataaatttctgaaacactacctgttttgcctatgttaaagatttacctctttttcatacctctttttcaatgaggtcataaaacagagctcatcctacaaggaatgtttctctaaatgccccattagcgatagaaaaacactcatcttctatcaaaacaagcctcattaactaccaaacaacaaaatactgtgaatcaaatattgtttccaggaaaatggtagctcgtttctccttcttcaagaattgtcacgtagcatcccctgaagatgttttaagtcaggtacgttaaacttctattctgattttacatttcaagtgtcaaaaggagggctggttcctggaacaaggaggctgccagttggcaggagcccaccttgtgtgtggatcagtgatgcaacacctttctggttttgtccacatgaaagaagccctgcccgcctgcagggctacaggaaaagaagttaaaaaataaaatggtgcaagtgacctgatatactaattatactgaatccaaaccaatttttttaaattttaaaaacaagaatagttaaaaacaataataaaaattcagtggctcagccttagaaaacattactaggttatacaaaccgtctgtcttaatggaaaaataaagagtgataagaaatttcaagtcatccaggaactacactgtccaaatatagtagtcaccagccacatgtaactatcaaacacagtgtgtggctagtatgaattgagacgtgctgttaaatgttaaaagaagtgttaagacttcttacgaaagaaagaaacataaaaaaagaatgtgaactatcttattaaatttttcatattggtcacatgatatttcagatatactggattaaataaaatgttgttaaaattaaattcacctgtttctttttactatttttaaactgtctattagaaaatgaaaaagtaaggccaggcacggtggctcaagcctgtaatcccagcactttgggaggctgaggttggtggatgacgaggtcaggagttcgagatcagcccggccaacatggtgaaaccccacctctactaaaagtacaaaaaaaaaaaaattagctgggcatgctggcacatgtctgtaatcccagctacttaggaggctgaggcaggagaatcgcttgaacccgggaggtggaggttgcagtgagccgagatcacgccactgcactccagcctgggtgacagagcgagactccatcttaaaaaaagaaaacgaaaaagtatgtggctcacattacatttgtattagacagttctttgctaaaagatgggaggctctataacagggcctatagaaaaaaaaaggcaaaaaaatttcataatgttttaagaaagtttatgaatttgtgttggtccgcattcaaagtcgtcctgggcagtgggctggataagctttctacaatatccaatcgtggaccatgaagtccttaccaaaagctatgaaaaaaaatttaaaatatacaatttactttgtctaatatttattgaggacctatgtgcaagacataccagacacataaactatagtttggattctaacagataaaaagagatatgactacaattaattggaagataagttatggtcttataagaaaaaggtaaagcaagggtagtatagcagagcaaggcacctgtaaagacttgtaaaggctgcatcttttcaggtgaacatttataaatatatagattttgacgggtcataagaagtggcactttagagttgacaaatatctttatcatacattaaccccatttgacaaaaaaaggaaaaatatttcagatggggcagaacggtgggaatgaaagcctagagaaagaaaaggtcaatggttttaggatgccaggagagtcacatacatgtataaggctgaaaatgcaggctgaagccatgtaagagacttctgaatgccctgcaagagaatttggacttttctacaggtagaataaaccatcaaatatttcctaccaactgtcaacaggattaaaaacacatagtagaaagatagtaacacatgggaaagaattatctgggaggagggtggatgaagcctgggggtgtgggggagagggagactgaaaatgcaagaaagggagaggagatgattgagagtccagcagaacataatcataaaagggaagacaggaaacaaagggatagaagaaggtacaagagttgctgaagtacaggagaaaattcaatggtttattcaacaaacacgtactgggcacctaccaaatgtcaggtaccatgttgcagaaattcacaatggatgacggtggaggggtcatctgtagagcatgagagagagttacgctgggaaccaaggagaatgaagttgggctggatcaactgctatggggaagatgataggtcatcaagacagagataattaggtgcatctagtaacattaagatcccagctgatgttacagcatgaataagaaatggaattaagtggtaaggttacatgacttgatactttagaaatcccagaagcaactaaagaaagaaattaatttttcctagctatggagaattgacaaaaatatgtttagaaaatgtgaagggtttcagccaagtcaaggatgttcaatggaataggtaagaatggttatccattgattccatcctgattagaaaggcaggcagggaaaaagaggataatggactaaaagcctgaactggggaggtgattatgagggaagatcatgatcagagaggaatatcaaagctataaaccttatggtactatttctaaggaatttcagagtctaaagcatgactgtgttcaggtactgaaatgggatgtaaatgaaggtaactaggaaggagctggctagcatttcaactgaatatcaacctggatagtgacatcatcactgaagactgtaattggtgggggtaaccatatgacccagtttgcctggatccttcagtttatgactgtggtcccagtgttctagctgatatagacaataaactctatgggggccctagtagcagattacaccagaaattaaaagaaaaaaaaacaagcatcctgtagtttgccgattataaacttacaactcctattgaatgtgctgtttggaaatctgtagctctagggaacatctaagagaatactgaaggaataagataagtgatacaatcatcacccttcgggggatgagacagcataaaatcaatgcctgaaccagatggcatttccaacccaaagattctcattttataattttatgatttgaatatagatgtttgccttcagttaagaatgagaatcaggtaagaagtaacgggactaagctccctaagaaaaagaggcgaaaataggtttctttacaatcaacaaatcaaaggtagttaaaaaaaattaacaagcatttattaatgcctttgacttccactatgaaggaaaagaaatgataaaaggccaaaaaaaaacccttacacatccacacagagaacgcccaaaatctcaaaccaaacctttaacgaaaattcaccttaaactaatgactgacaatcccagagagcatttaaaaatatttttaaattaatgaccaaaacagaacgccattattatttcaactccctgttagaactaccagtaacctatgatagttatcagtgggattttgatcccaagtttaatattaaatagttaaaattaactctgtgatgggtgactgatattattaattcaacaggatgccataaaaattcatagttcagatttttgcataacagcagactctgatgggagtgggcagagaccttttcagtgataaacagaaagattaatttacaggatacaaatactccatacaagatgtttcagcatctctgaggctgaacacaaaggccaccttacctcccatctgcatagtctgtgtctgctccgccccaccagacatccgagtcatcctcctccgcatcagcagaatccacattgtcactttcttcagccagtgggcaacacacaaactctacccctcggaacttgtcaattccgcagggcagcaacatgccgtagtcatgcaagttggtactcttctcactgcatgtctacaaagtgtaaggagaaaacagtgagtggtagagtagatgtgtttcattgtaagaaaactccacataaaataatcaacatgcagacccaatatattaggaaccaatttcacaaaggaaaagattatttgctttttgagtgaatttacaacaggattttttttagcatgggttacactttggtactctttttattcttgtttattatttatttaataagaccacgatgttatataatagaggtttatacgaacaactggaatggaaactaattgggaaataagatgtagcagtctccactggtgaacagataccagagaattaatgccttctggcttaattcgtgtatccagaaattgtgcgcattccaggtagatccccagctcactcctacctcccttacagatggaagtttatctcacatggacctgccttatcctagaaattctgactctcttggttcactttcagagtaacaatcctgggaagagaagaaattatcccctgcagccactaagaatcagaacttacagtcattagagatttctccttgaatgtctttttgcttttctgggatttgctaaatttgcacaaatctagattagcataaagttctgagagcatccactagtgataaatgaaggatgaataattcaagacataaaggtagacaatgaaaatattacagactgtattttgaccttatgggagtcatttccgtttcttagagacaaaggatttttcttttgaaaacacagaaggaataaaaaatgaggttatcaaataggtagctggacttcaaattatttggtttgttttcttaaactcagcaagctcttaaacctccaaaacacatttttacataaaaaacattttattctacagtggatccaaatatactattttataagaggcataaaataatactaaatcttcagtggtattttctgtctaacagctataaagctatgatacaatggttaagctaagctagatcagatttctcaaccccagcactattgatgttttggactgcctaattcttgggggtggcgggtggttatcctgttgactgtaggatgtttagcagaatctctggcctctgggcactatcagatgccagtaacaccactccctcaagctgtaataacaaaaaatgtctccagacatgttccggtgagggacaggggatcaaaattgactcaagtgaagcactatgagctagataaaggagcctaattctagttagcctaagactgatcttgccacaaataaacctatataaatttattaggaaacctatcaaggggacacagcagctgtgaaggtggtcttaccacacagtgaccttttcatgctaagtatcttacatcttttattggcttagccaaaagcagaggttaaccaagtgctcggtcagactcaccctgtggaaaaatcaagatggtaggcatggcctgctgaatataaaactggatggtataactgagaaactgaattctaactggagctttcaggctggtataaaaaagctacttcactgttctaccactgtattcactaatagataacaggggaaaaggctaaattattaaaaaattgtatatgacaaaagaaaacaacaggtgcataaaaataatctgaagggtaaactttaaagttataactattagagattatatttttaagttataaggcatggcacagacaacttatatttttaagttgcgaaacacggcacaggcacataatgaatctagttcaactggccctatttttgactttttaaaaatattcatggatggggaggctgcgcatgtgtggggacagggggtacacgggaactctattttctgttcgattttgctgtgaacctaaaatcactctaaaaactaaaatctgggttacggatagtagcactgggtttttttcttaaataacttatcaacatagctgttgcctcaaaatacccctaaaatgccattaagcacgtccccaggaaatcttcactttgcaataagaaagaatttatgggctggtacctctttggcgacggtgtgccagtgaagatgagtttcgcaaacatccatcctctcctggtgtaagaatttgcacttgtcaggaacgagaagggcatcacttacaaactcaccaactgaaagaaaggaaaaccacttcccgtcattccatctgtatcacagtgttcttaccgcagaagacatcaaggaaagatagacttcaagacaagttaaacagccttttaatgcctaagcaacccaatcaagaccctactacctttagaatgttacgtctggcctccttaagcaactccgtttcttgccacttcaagtttgatggttaaaataatgcctaaatgctgcaagtgaaattgtcccttaattaatctgaatttcttgcttcaaaattaatcctaaaaaagctgcttaactagagaaccaattaccattctactacaacaggggagtaaaatataaatattgacattgtctaggtaagcatttgagcagaatcaatataaatccctacttttctttcttggacattttaatctgcttgtaagtaacagaaattttagcatttttctacttcctaagcaaaaaacccaaaagtgtattttatatatatgtttacataacacacataagagagagagagtttaattcagtttattctgaaaactgtccctcagacttttgttaaatctttaaagaaaatgtatattatgcaaattatttctaggcatttctggtattgaagatataaagatattacataaagtcctacatgaactcagtctaatgaaggtaaaagatggataattaccacattatatgtaagctgtaaacttaatttttgtttactgcaatattcccagcttttagcacagattcttgcacatagtaggcaataaatatctgttaatgaatgaacaagttaaattctgtaatagagataaggaaagtgtcaggccagtatcttgggtgcagtgggaaaaacctcaaagaagaaacaatattcgagatgaatctgaatggtgagaagtagtatgccacatgggaaatgaattgaacttccataacgtaaggatagactctgtcttgcttgccattatacccccacaattcctggcctagttctgtcaaacatcaagaactctattatagaatccaaatggatggatggatgggtagcaaaagacccttcaaaatgagggagcctcctgtgcaaagacagagtaaagaaccagcaaggcatatttgcagcccatctggatatgggtggaagcagaaagcaagtggcaaagggagtccagaaggaagtagcactggggaagcatgctggactccaattttaaagaggcttaggttttggatgccattttggaagaagcaacataggccaaaagtttttttttttttttttttttttttaagatagactctataattaagtgaaggatagatcagcatagtgaaaccatgaaagcagggagaccaccaagtaggtcactgtggtccttcaggcaaaacatgcaagaatagacataaacccacaactcccacggagcaaggaatacagatcgtccacacagcagcaaagacaggaatgaatgtctttctttcatagtacgctatagggcattttctgaaatgcaacataaagagggattaaaagccctaagaaggggaaggaagtaacttttcattctcataaaagggtttaaactttagtctgtttctagctcaaacatgtaagatgtagcatgatactgaagtacttatttcaataagtactatttagataaaaatctaagcaaatcataggggagaataagcactgtatcttgtcattccttaaatctttaaaatgatcaatgatgcccatagcagtatagtgtgtgttgcagggaatgcaaaaattatgagacatggtaccccaaaggctgcaggtgtcactttgcagggaagaaaccagtgagtactgagcacacaccccatgcagctccacagggccacatcacgggttcttttataaacctcacttcccaggggaggaatctccgccaagaaacctaaggctacctaactcaggagattataacctagccccagagataagcattaagatataaattataaggaaagaaataacatgataatgcaaatgataccacatttctcttttacatagaatgatataaaacaaaacaaaacaaaacaaaaacaaaaaacacaagaagacctggagaatggaaagtaaaggtaatctcatccaaaacaaatacaccattcccaggtggatttctcagggtttctgagggctctcagggtttctgaggtcagggactaaccctagctgcttggaagaatacctgatatctgaggcatcccaattttctaggttacaggaggccagaagtaccctatggcctgaagatgcccacctcatctgtcagctctgctcagtcatatttgcaaatgtccaaactaagaagtgatgcttttctatttgacaagtaactactggaaagattaaatgcctgtcatgtacaaataggtcaaagagtttaaaaaatctaatgctggcccaaagctactaaatcagttcgtgagaagagccagagcaggtatcagatacactcgaccttggcctgcaagagttcttgggggcataaatcagacagtaagtgccaaaccacaaaaccaaatcatcttgttttatctgcccttagtcaatctgctgacgactagattataatgcaaagctaaagttaccaaaacatatttacttattcaccaaaaggacatgtactgcattaatctttttgtttgtttgttttcagacaaggtctcactctgtcaccctggctggaatgtagtggttggatcaatggctcactgcagcttcgacctccgggggtcatgcaatcctcccacctcagcctcctgagtagctgggactacagctgtgcaccatcatgcccagctaattatttcactttttgcagagacagggtctagatatgttgcccaggctggtctcgaactcctaggctcaagcaatctgcctgcctcagcctcccaaagtgccgggattacagacatgagccaccacgaccagccagtctgaacatttttaatgaggagttggtaaacaagcttttcttaaaagcctgaattaattaaaagttgccttggatattaggagttcattagctaaggatgttactcttactttcatctggcagaaaatctatccaagagaaccatattcttgaacttgtgtttaggacagaggttggcaaactactacttgtggaccaagtctgcccacccaccacccccctgcccccaacacctgtatttctgcattagactgactataacaattgttcattatgtttataagtggttactgaactttctaacttgcaaaacatttcatttgatactgccaagatggtcttagcttcttatattgcacaaagctaagaaatatgtgtccctcaaaatgagaatggttttttaaaggattaaaactggttacttaataagctctcaggactaatggcaaaatagaaacctcattgtattctaacattaaaataaaatttagcagtggacagcactgcttacattacttttaaaatttgatgaaacatgttagaaggttacacatcagaaattgtaagcgattcaaccacaaaaatctgtttttaaaaacttttaataagcgttaagagtgctaaaagtataatgaagcctttttcaccaactggcttagcacggtttatattttctctttttaattaaaaaatattgtacttaaaaatctttgctaggacagcagttacatggaaactgtactttctactcaaacttgctgtgaacttccactgctttgtttttaaaaacaaagtttattaattttaaaaagcctatgatcgtatatacctggagtttctctccacagccacgtataccttatttttataaatgcttctgcttatttgctttgatctttcaggtaaaaagagttcttaacagaattctgatgtaagagatcaaagactaaaacaaattaaacatcataatgagaaatcatgttcctgtttacagcaaactttaggcaatttggcaccatttatttcaagtggataaattcatcaatatacagtatgcatgtttattgagaaacatacaacctggtttcttgctaaaacaattcacaatttatattcaaaacgcatgtcacacaccacacacacacacacacacacacacacccaactgaaagggtgttttcaaagctaatgaacaaaatctgggtctggcttcttggctatgaagtcttggcaaggtgaacaaggatggcaaattcaataggagtctgcaggcctcaatctgctagctctttggtggtctttgggaggactgtctagctcaaattacctcattttgcagatgggaggaaaagagctcaggtcaagtgacttgcccacagagccaactggcagaagaactagactgaaaatccaggtctccagttctccatccaagagtggtaactcaactcactcatttaaactctgttcaaaatggttcatttggcccatttcctttggcttttacaaaagtagttcacttttagactgtgaagtactttaatattataatctacaatgtggtcaatttgacaataaaactagacttaaattagctagcaagccatatagaacagctgggaatgcagtcagcggcagagaatagaccacatgtcaaaccgtggcttaaacacacggtaggattatgtatctcacctaagaagtgacactgaagctagggccactgcagatattccatgatgccatcagggaccagcgtattcctatctttctgtactgccatcctgagcacgttggttttatcctcgtgttttatggtcacagaaattcaagactctgtgtccaagttccagacagaaggcaggagaaacaagacaaaggtgaaaggttttctgttgttgttttttcctctaataaagctttgctgttacttgggagggacatactcctcagcaaattccactgaggccatatgtgccattactgtgatctggtcacatgcacctgcaagggaatctgtgaaagtattttcagcagagcacattgtcaccctgaacaaaaaaaatctggaattcttttagaaaggaaaaaatgggaatgaatatcaaacaggcgagtagcagaggctcccacactatggaatttaaagtatatttttcgatttctttatgttgtcttttcaaaagacagacagaattccaggaagcaaacagaattcagagtaaaaagtactgcaactaaaaccacagtaacttcccaatccatgacattgggaagaatgagaagggaaagatgtatcaaaactgactctgctgccaggatggcggcacctgggggtgtcatcccagctacttgggaggctgtggtgggaggatcacttgagcccaggaatttgaggccagcctgcataacttagagagaccctacctctaaaaataaatgtttaaaataaagacattaggccgggcgcggtggctcacgcctgtaatcccagcactttgggaggccgaggcgggcggatcacaaggtcaggagatcgagaccatcctggctaacacggtgaaaccccgtctctactaaaaatacaaaaaattagccgggcgtggtagcgggcgcctgtagtcccagctactcgggaggctgaggcaggagaatggcgtgaacccgggaggcggagcttgcagtgagccgagatcgcgccactgcactccagcctgggcgacagagcgagactccgtctcaaaaaaaaaaataataataaagacattaaaataaaaaaaaaacagactgctgaagttttgagcatcagagtggggttgagtagattaatgtaaaagattctagagccatacacaggttcttcaaggcacagattatttgaatatcagattaaaagacaatatttctatgaactgctggggactaaaatgatgttggccagaatcatgggaatgaaaggccaaaaatgcctgaggtctttggacttctgcccgaggtgtgccctctcttcctcatctctcaagaggtaaagatgattcaagaaagtgggggaaatgttctggcaatgtaattactgtaaaatgccaaagcctcggtttccttgtgctatgggcccagatctgccttgtgaagataaaacaccagtattgttagtaactctgaactgtgtgcctgccaccaccctcaatacttcacgtgcgtcttctctcaccgtcctcagaaccacaccaaagcagctacaatgatttcactttataagagaaggcaagggccgggcacagtggctcaagtctgtaatcccagcactttgggaggccgagacgggtggatcacaaggtcaggagttcgagaccagtctggctaatatggtgaaaccccgtctctactaaaaatacaaaaaaattagccaggcgtggtggtgcatgcctgtaatcccagctactcagtaggctgaggcaggagaatcgcttgaacctgggaggtggaggttgcagtgagccaagatagcaccactgcagtccagactgagcgaaagagcgagactccgtctcaaaaaaaaaaaaaaaaaaaaaaaaaaaaaaaaagagagggtgagactgagagactatgtaacagtccaggtcacatagagagtaaatggcagaactgggagaattaaatgaattaatatccctaaagtactcaactagtgcccagaacaaagttgctcaataaattatattaatagtatccttctccccagtatctatctcatcaaccacagtagtttctcataataataatcatagtaatcaaaacagcaacagctactcttcatcattcactaatcacctatttcgcacctactgaagacactggggttttatatgttcattgcaccatcaccacctacttgtagccccacagagatgacatggtactgttttacatgtgagtactgcttatgatggggtgaatacatgacagcaatcaacacagcggggtggagtccctacgactggagaagcagagaatctgagtgatcaactctttcaactcttgcaccgagtgctggtcctggctgggagggggtgtttcctaaatcccctcttgcagccactgtcctttatccactaactcttcactgcatacttacaattatgtctcagtgctaagaatacagcagtgaacaaaacagataaaacgatatatgatcctagcggggaagcgataaaaaatacagataaaaatacagtgtctgttggatggtaataaatgttacatagataaagcagagaaaggggtggtttgtttgttttttctgaggggtgaaattttaaatagggtggtcagggaatgcctacttgaaaatatgacatttcagtgaagacttgaggaagtgagggaacaaagtattcagaatcaaagggaagaatattctagccagaggaagcaacaagtattacacaaagtcttgaggcagatgcatgcctggtgaactcacagaagaacaaggagatcagtgctgtcgtggaggaatgatgtggaagagatcagtgggcaagcgagtgagtgacagccaggacaggacagggacagctgactgcacggggccttaaacattgtccaactctggccagtactcagagtaatgctggaaggctctggggtggttttctaagctaattattcttgccctagggggtcaagactagaagtgagaagaccaggaagggggctctggcattaatccaggtgggagatgacaatgacttggaccaggatgagagcagtagaggtggtgcgtgttctcagattctggatgtcgtctgaaggtcagatctaaataatcaaatagaaaggagtcaagaatctagcttgtttctattccaacagctagaagatgctttatactgaagatgatggaaaagtctggacaagactttcctaatttttctgtgtagatgtgtagacaggtagaacttttgagaattatgtacttactaacttgtatacactagatatgtgtatatgaaaatgacagctacagataaatgttttcttaagtgattttttattttaccatttcagactcttactccacaaatttttttgtcttgaatgtgctcattatatgctatcttttgtaactttcacattaacaaataggctgggaaaattttcctgggaggcatctgtactcaagagacgggacgattacttcacagaaacagccaaacatttctcaacaaactttccatgtgataaaactgttatggttttagcttcagagtgtgggcagttactgggttctcaaagaggacatgagggtgaattacacatccttttaaaaagtggctgttgccgtcaccagcatttcactgtaactattaccggataatagtgagaactgacagatgggattcttcagatgagaactatttgccagatggtaggaactaaatggatcaagataagcaaaaaggcaaaagaagtgaaaactaaaagttttacctaaatcatctctccaacttttccaagtgcacagatccagcctcacatacgtaccatatacacacacagatggcagagtgagtataagacagaatagtgctggccgggagtggtggctcatgcctgtaatcccagcactttgggaggccgaggtggatcacaaggtcaggagtttgaaaccagcctggccaatatggtgacactccgtctctactaaaaatacaaaaattagctgagcatgttggcgcgcacctatagtcccagctactcgggaggctgaggccgaagaatctcccgaaccagggaggcggaggttgcagtgagccaagatcacaccactgcactccagcatgggtgacagagcgagactctgtctcaaaaaacaaacaaacaaacaaacacacacacacacacacacacacacacagaatagtgtttaacccaggctctgaataacactggtcttaaaataataaaaatagtgcaaaggatttactttaaaaaagagaaaagaaaaaaaaaaccacgggaacaaaataagtatttatggccaggcatggtggctcacacctataatcccagcaatttgggaggccgaggcaagtggatcacctgaggtcaggagttcgagaccagcctggctaacatggtgaaaccccgtctctactaaaaatacaaaattagctgggcatggtggcgggtgcctgtaatcttagctactcgggaggctggggcaggagaatcgcctgagccggggaagcagaggttgcagtgggctgagattgtgtcattgcactccagcctgggtgacagagggagactctgtctcaaataaataaataaataaataaataaataaatatttgttagcagtcttgcagcttttaaaaagatccatataggtgtgggttaacaaatttttttatattttttattttttatttttttaagaaagagtcttactctgtctcccaggctggagtgcaatggcacgatcacagctcactgcagccttgacttcctgggctcaggtgatcctcccacctcagcttctcgggtagctgggactacaggcacatgctaccatgaccagcaatttttttgtatttttagtagacatggggttatgccatgttgcccaggctggtctcaaattcctgggctcaagcaatccacctgcctcagcctcccaaagtattgggattacaggcatgagccactgtacccagcctgggttaacaattctgatacggctacgcacatatactgaaactgaacaattaagtacatagatggtggatggagtgagaatttatacataaccaaggaggagagatatagtgtccatgtggtaatacgttagagtaggaaacatccggatgaacttgtatttagcttaatatagactagatattatagcttaatataaatacaactagttagctatagaaatatttatagatctgcataacataagggtgaacatggacaaatacattgccttgctctatcaactgagaagtcttaaaagcaaagaaactccagtggcaacgagcatccttaacatccagattttaatactattctccaataacattactctccaataaaaggaacaagggctccttggaggaacagctgattctaggattagggctgaaaatatgcaagatgagactgcagcatcttgtaagaaaaaaaaaaaagaggctatgtcaaatgagcataggaaccaagtgaaagggcttctaatagctaaagccggaataatttgagcaataaaaattatgaagtagtgctggattagaaatcaaagtacaatgtaaatatccatgagtctaaatgactgaatgaatgaatacataaataggaaaaaagagacaaatctcctgcgcagaagaattccaaataatttatgtagatactctgccctcaagaaaatgaagcataattctctgctccttaattgtgggctgtgcaaactgacttccttccaaagagtagagcacataaagtgggaagaagagtaattttcaagtggagaaactcaacaaccaccacctgagccaggtgatcaaggtcaatgccaacagggctgtatcatgttgataaacacgtacccttgatatgatgtgatgaaatgggcattttacctctgtggtcttccttcttaaaaccaataaccccaggcaaagcatgagaaaattcccacagaggggaatcctacaaattatctgaccaatacaaaacctttaaggttattaaaaaactagagaagtataaagaaactgtcatagccaagaggaaaggaggctatggagacctgacaattaaatataatgcgccttcctggatggcatcctggaacacagaaaggacattagacaaaaactaaggacatctgaataaagtatagactttagttaataaccatgtatcaaaattggtttactgactgcaacaaatgtaccatattaatataagatgttaacaatagggaaaactggatgcaaagcctatgggaactctctggactatcctctcaattttcctgtaaatttaaaactgttgtaaaatataaagtctattttaaaaaaatttaatggcttgatataaaagttcacataataaggtgtcatgccaaactcctactgactgcaatgtggatggcaccaggttcaagagccagaagaggcccagagctagtgaaccgtatgtctcatagggttttactgggggcttgcatacagggtagagagtccagtggtggtgggttggacagaggaaccgcagccgcttgcaaaaggcatgtggtctctacagcattctcatttaacaccctccccctaacaatctccacctggcaacttccacttaactcataacaaagggtctcaatccccggcgaggcccatgttccacagaaggagatgagggctcagatgttccttacagataaggaatggctctctgggttagccactcctggatttctttgttgttgtttttttgttttgggttttgttgttgctgttgtttgaaacagagtctcattctgtcgcccaggctggagtgcactggcgtgatcttggctcactgcaacctccacctcccgggttcaagcaattctcctgcctcagcctccaaagtagctgggactacaggcctgcgccaccacgcccagctggtttttgtatttttagtagagacggggttttgccacattggccaggctggtcttggacttccgacctcaaatgatccacctgcctcggcctcccaaagtgctgggattacaggcaccggccaccccgcccggcccactcccggatttcttaactcagaactcagaatcaggtgcacctgccacacaggatcattgtcagggcatgttcaagtcaagtgatccctgtcaggtgcatctaccatacatagaggcatacctatttgattccacatcaacattctagccttcaaaaaaaagtctataaaattattgtagttgaaaagaactagaattaaaaagagcttaccaactcaggcatctcatctgtggtatctattaataactagacagcgcttggtttgacttttttttagaaaaaaatataagtaatgtggcatttaaattttttaaaaattcaagaatttcaaaattatcacatatataccgaaaattctttgctttccaaatttaaccttgtcttaggaatgtaaactaactggtcagagaattcattcccctttacaaatgaggaatcttgagcctgatgaggtttgcacaaagctaatgacagaggtgggctcaactctgaaaaccgactctcattccaatgttcaggaccccaagaaatgttacagtagtcttactaattttgaatgacagcttcctcattaaccaacccaagataagttataggtgcttttttgttgcctctttttgactgcactattagtcatatcttgattttatcaataacaggacttcttgttacaagtatttaataattccaacattcgttaaaagatggaattgtaagagtaatagttgttaaagctttccagattaggggttttcaaactcaaaccatgcttcaaaatcacctgggatcctgatcagtctgcagattcatcttctccctagctccacagcctagatctgatttacgtgttctgggacgcgcctgaaaacagaccttcccagggtggctctgcttcaggtggctcatggatcacactttgagaaatgatatttggagcagggcttctcaagctttacagtgcctatgaatcacctgggggccttgttaaaatgcaggttttgattggacaagtctagggtgggactgagtctgcttttctaacaagctcccaagtgatgtgattcagctgttccttccggcagtaagggtctacttaagataacccattacaactaatctcattaaggtttttaaaaattttaagttacaagttattgctttgtaagacactctttgcttacccacttttaattatacagtttagtgttaagtagattcatatcgttgtacaaccatcactaccttccatctccagaactgttttcatcttgctaaactaaaaccctgcacaccattaaacaactccccattcccccacctccactccccattcccccacctccactccccattcccccacctccagaacctggaaaccaccattctgttttccatctttttgaatttgactcttcaaattcaaaaaggtaccgcatataagtagaatcaagtatctgtcttttggtgactagcttgctgtgtccttttaaaaaataaaaattttcatgcttctcttccataaacctgcatctcatcctatagatttgtcacttttggcaccaacttaaggactgagcgccttttcacacatccctaagagccaagctgctcctggttcgccttttgtttaattatagaagttacaaaataaggtagaaagagttctagatttgaaaacaacacaatgactcaagcagatcaagtgatttccaaatattaaaaggtgatatgataaatgcctcctggccagagaggtgcacatagggtgagagacaagaataaaaattaaaacttaacataatttgataagagatcatctctgctactgctgagtattactaaataccattctatgcaggtccatgtaggatacaaaagaaccgagatatagttctggaccaaaacagcttggagcagctttgtctcacagaaatataatagaggccacatatctaatttaaaatttcctgtagccacattaacataaaaaggtaaaaagaaacaggtaaaattaattttattaatatattttaacccagtacatcctaaatttcatcatttcaacatgcaatcaatgtaaataattatcattaagacattctacatttgtttttttctcccagactaactttttaatatctggtgggttttttatactcacagcatagtttggactagccaggtttcaaatattcaatggccatgggtggctagtggccaccgttgggcaagacagacttagcatcagattttagagatcaataatatatttcaaggagtagtgacttgaatgtggacaggttggggttatgggagaaaatctaaagccaaagacacaaacctaggcagagaaaccataataagcttgaatacactgagactgcagtacaccattttatgcgctatgctatcttaacgcatacattttagtcaatgggaggcatatcactaggattctatgttaccatcattaaccctattgatcagcaaactgctcatctccccccatttctcttgttgcagttctcatatcataaattgtatttataggtgtgtgattaattctaatacagaaattaatttaaggtttcctttagacttgaacctactttagcttagttcagtcctctgtatcccgagagatgagctgaaaaagcagatatagtagagataattctaaattccctactttgtttcttcaaaatataggtattctcactggttgctttctcctaacactttcctttctttctgccttatttaaaaaaaaaaaacaaaaaactcaaagcctgatagattttagagacgcaattaattaaggttatatacggggctttttaaaaaccacataattgccgacaaaataccaaccaggttggtgttccgtgaggcaaaagaaccacaagtcattaccaaaaccttaactcatatgggaaggtaaaaatatacagcatgctgttttcacataccatactcagaaagccatgtgcgagggaggctataatcaagacaggaagaggcattttcacagataacttcttaacggggttgtagactgtcactctcacgcccctcacttgttctttccaacctattaccatctggccttgctccaacaatctgcaactcttctttcaaggtcaagaacaacaaatgccatcagtctcttctcagccctccagttctctgactactctgccacattctctttttttttttttttttaaagagacggggataccctctgtcaaccaggctggagtgcagtgctgtgatcatagctcactgcagcctcctgggctcagacaaccttcctgtctcagccttccaagtagccgggactaccggcacatgccaacatgcctggctaattttttttttaattattttttgtagagacaggggtctcgccacgttgcccaagctgatctcaaactcctggcctcaagcaactctcctagcttcagcctcccaatttgctgggattctaggcatgggccactgaacttggcccacttttcttctttaaattcaatcttctccagtttccaccaatctatctcaagccaatcattctttccctctcattggctcctcttttcataattctgattataaagtaaggctctgtcttctactcttcttgctttctcactcagacatatcatccatgcctaagggtcaacagcctcctccactctttcaattctgacctttcacttagcattcccagtcgcttgctgcatgcttccaattgcagggtattaattacttttagcaaatgtactagaatcaagtgcccaactgattatcaaattccggaagtgtacccaaaggacaatgactaattcctcattgggtcaaagtctttcctatgtggaagcaagagaaaggaacagaactaacactgaacattgtgaggagcccaaaacatgactcctgctgaacacattctatttggttgtagaacccaaccaatataggccccgttgatcgatttccccacaacaagaggaggtcataaaaatcatgcttccactttctcaatagatacttatcgctcatgaatgtctgtgaatcagaagaccatgggactataactctactccactcaaactctccatactcccaaagctggacctcatggtcctcagatcatgtaatactcagacacagcactccagtaaaccactttctggccagaaactcatccttcccatagttcctctcccttccatccactacagcttgttcatcatgatcctgaggtcctggatgctgcagcactctctgcagttatcaggggaggcttcactgccttcagttcatttccctgccagcctggtctaggaccctcagcacacacactcatcactgcacatatcaccaacgaccacccacatgcttttgatgcccaggctcatttggtccagcctatttctctcctaagtgtgagactcaataaatacacaaccaccccactgtgctcttcaagagcttattaactgcctcttttagattctcctgggtatagtccagacttaaaatgcctcactttgggagacaatgtaatttaaccattggaggaacaaatgttggtctatatatttcaggcattttccaaataaaaacctccaagaaaaagcaaacttgtatcttaaaagatgcagaactatttagggcaaaaagtacacagagaatgagaaagaaaaaagatgtcactgcatttaacaaaagagttaacaatattgttaacaataacaagagttagccatgaagtaattaggatatagtacttgaaactggcaccaccttttaccaggcattacaatattgctatgagttcacaaagctctgttagagcagaggaaaaagaaggatttgaattctgtcactgtactagcaacaccacctagggatgaggaagacaatatctaatagaataacaaataaagtaagtatacatgattcatcaagctcttcaataaaaatgtattttagaatttatcaacatcccttttgaatcatgtttcaaaaatcacacaatctgttcaaacacggatagacccccagataaatcagaatctctctctctgttaccacgcctctgtggacttagaaatcaccacttagatttgtaaacaaggcttagtttcattattgtaaatcaatttggcaggacttatcactccacagagagctgaaataattgaatttctggacttctaaggaagaaggtttaagtacattaaggcttccaaaaggaagatcaccaactcttctttagcagaaaatgcccctggagaattttgaaccatttcttgatctagtggcaactggatgttatcagtggcaactaaggtatctgtctacacctgctgaggctcacaagtaaaaactaaaaagtactgtgaatctctgtgataatggagcgtaaagctaccacttaagtctttattactagtaagtaacggattttaagaaaaaaagagatactcaaatctatctatagataaccaaaaaaccaaacaaaacacccagaaaaatctaaggttgaagaacatatataatttgagacttttgaaacaaaacacccagaaaaatctaaggttgaagaacatgtataatttgagacttctgatcagagccttcctcaataatgtaagtttaaaaactattaccaaagtgacaagatcccatgtcagatagcagaatgagaacaaggctactcttcaacttagtcatcctcttttatcactacaacttcaatcatagatgtaaatggaaatttctgcttcctttgctacttttctgcttgactgaattttataatgaaaaacgtctgttccttccaggcagagcacgagtgtcattcaaattgtacacaccaggcaaagagtgaatgcatttgtttagatgcaaaaatcatttaaatatgtgtcattataggctgcagcacatttgcggattcggcagtttaaaattctcttaagcaataaagcaaggcatcaaatgaaagtgcactcaggcttcaaacatcttcagactatgttttcctgtttgcacacagcgagccccgccttcctttcctgaccccactcaaacagaaagcagtggaaccatgccctagcccatcctattaccccaaacgtcttccaggtcagcaatccaaagtcacgtgaaagctccatcttcagtttccctctccagggagcaaatattttgaagagcaagcattccaagcaagcagaaactcagcctttaaatcaaactaagcttaaaagtaaggtcctgccgcacacagaaggcaacagaaaagtgtctgaagagatagctcccattttatatttaacatttagaaatgagaaaactgtgtgtgattaatgcttataattagagggggttaacccttatttcaaataatgtagttcctgtctttcatttaaaattataaagatgactaaaatgtacatgaaaggaaaattacagttaggatctgctgtgttttaacccagaactgtggttttttgaagaaaatgctggaaaagattctgatttggtaagaatatctggatatgagaatcttctaagaaaggtgatttaccattttcaggccaaaggcagagagtttctaacaatgataaaattaacaggctgtaggatcttcattctctaagcttcaggtgacccttttaatgactaaataaagtgtgtactcaaggtcacccacgaggaagaaaaaggtcagttccctctcttgagggaccccctccccactcacgctattacacagcaattctagagattcacttcatttttggtttatgttcaaactgtctggatatttcagggccttcgcttttaagtttccataatagggcagttgactatttatataagtccctggaaaatgtgtatttttaacgtcatctagagtaggccacctttgggggaaaacagctaatgggttaaaaagccaactggtgtaccaagtatgtacaaaagacatcttttataacagttctcacgtgcaaaagaacattcattaagtataacaataaataacaggcaatatgtgcatttttccagaccctaagcacttgataaagccatattgtcattttacactcatttttagtagctgtttaattggtattcctgtataggacagttttgtaggtttccggattatttcacattctcttcttcctagttataaattttggtacaactgtaagctctcctcacactgtaataattacattgctgagaccacatctgtttttttaaaaaagatattttgcaaaaaatatatttaagttgaagtatctgaaatacttttcaacgtcaaactttgagaggattatgcttaattatatatcttcacatctttaaattgttaaaaatgaatgcataaatatttcctagggatttatgcttgattcatttgattcttacatactagttgttatttaccggcagagaaagcaaaagcaaaaaaaaagaaagcaaaaacaacaaaaatagttgattctggtgctagtccagaatcaggttgatttctgcatcaatagcagggtttctacattaaattcattcaaatttaattagttctctgcataaaatcaagggtctaggagaatttaataaaagctgaaaacaatcctatcctttgcctgaaacagatttttatcccaaatggtactcagcaataagccaacagagaaaaatggaataacagacatatgccatgttcacgagttctctgtttaacctaagaagtctgaatttgccattttttgataaggaactggtgtacatcttagaagaaatattccattgagtctgaattcttggtggagcacccgcagaaagagaaccagtaaatagtatgtatgaggcctggcctggacataatgactcaggaatcatcaatgcaggcctctgaaaaaccactgcacttatgagatctcctagcaagtatgtgttgtgtgagaaaatggacaaccccagggtactcctattaaacactgatatttagaatttctgaattctgattctaaatattttgcaatatttggaatttctgaatcctaaatattgcaaaaggtggcgcggggaggacggggaagggagcctgaaaggaaaatggaggacagcagaaagaaaatcagaagcagcagaatgacatcagtgtggggagaatgcacccatcaaccgatgccactgagagactgtggaggacacaacagtgcccagtgagtccgacaaccagaatgatagcaaagagctcattccctggagctcaaggaacagatgcctgataacaggtgactgtggagggaactggaggttacgaagatcacacaggaacttctgactaccatataaagaagcatatctgtgaagagacagagcgagggtggaagttaaaggaatacacagagttgaatgactggagtgagggatcagggagctctaaagaagaggaaaaatatgagaaggctaaatactattgagatgtgaaattaaatacagggtcagtaggccaagggtctttatgaagtcaaagatcagatacaatgagagtaaaggacctactgaagaagctgtgtgcacagatgcccaggaattcagactcacctaagaatttagaacaaaggtggaaaaagaaaactaagctcaaattatttaaatagtacaacagggtaacttcttgacatactgaacatgagcctattcatgttaaatatgcttggagaatatcattagtccatggcttacaatcaattctaagctttcaagaaagcaagagctacaggacctattcataaaaatatagcaacattgggaaactaattatcttcccagctgataaagataccatccaataaatagggggatcttcagtgacatccaaaccttcaaaaaatatattttaaaatgttataccacgttctcggaaggtagttaacactaaaaaagatttgggggaactgaagctgagtaatattcttgaaaatacaggtacctaatcaataaataaagagaatgccccccaaatttttcatggcatgaaaatacttaaaggtttaagaggggagtacctacatctattaatacaccaaacacctactgaaacgccacattcatgtaatcacttaataaagacattaaaataggatgacaggagttcatgtttagcatttataaatagtatcctaacctttaaggtacaacataagaatctgaaatttctaaaatctattatcactgaataatatttagaagcagatttctgtgaaaattaattcttaaggccaggcgtggtggctcacgcctgtaattccagcactaggccgaggcgggcagatctgttgaggtcaggagatcgagaccatcgtgggcaacatggtgaaaccccctctctactaaaaatacaaaaattagccaggcatgatggcgtgtgcctgtagtcctagctacttgggtggctgaggcaagagaatcgcttgaacccgggaggcggaggttgcagtgagcagagattgcgtcactgcactccagcctgggtgacagagagactgtgtctcacaaaaaaaaaaaaatctttatcattagccttaaaaactaaggacaatgaaactattataaatgaatctaatggtatgttttatctctaaacacagatgcctctgatacactgactttttactagacatgtgtaggataggtttaaccctatttctggagttgaatgttctttttattaagatccaaagacacttggtttcttctcttctgagatccctatgttacttcttggttgttacataaaacctgctcttcctttgttgatcaataaggagtaagtaaagtaaatgattttgccataatctcagaaattcttttaggcatgtgaaattgctgctccacatcttctgtctttctaatgtttgggctattctttcttttccctttccttttccaatatttggctacatcctcaattcattcattaaatctatatatttattaaatatgtactatgtaccagacatgttcaagctctgggaatatttcagtgaattgacaaaagtctcaattatcgaagagcttacattttgaacaaaaagcaattatttcccaatgtttgagcaccgcaggaaagggttaaccatcagcatcatgcactacttattcacaatatagctgcacaattattgtttcctcttatcaggccctcaaagccactgattataatactttgtcccaacctattaccctacaagtttgctagtaaaattcgaagatgaccaggagctatttgcaggatactacaggctatgaaagtattactccagagtataatcagttttttccccaatccaattgtatcatctattaaaagagctaacataataaaaagctatatcctgatgcccagaatttacagcgtaacaaggactaagaaagcaggtatcttagaggtaactttagcctattaatgacatgtgcagtacaaataaaaccacattgaatgtacagatatttttctggacatcgaataagagaaataatcaaatgaattaatgtctgtccaaatcaaaaatctctacaagtgttccaactttaatgaaccaacttagttctattctaattttctattattatttctcaaggctaccaacacaaactactttccctggaacatccccatgaatatatttatttatttattgtttaattttttttgagacggagtttcgctcttgtcatccaggctggcgtgcagtggcgcgatctcggctcactgcaatctccgcttcccggtttcaagtgattctcctgcctcagcctcctgagtagctgggattacaggcgcccatcaccatgcctggctaatttttgtacttttagtagagacggggtttcactatgttggccaggctggtctccaactcctaacctcaggtgatctgcccacctcggcctcccaaagtgctgggattacaggtgtgagctaccacgcccaggccccataaacatttttaaatctacacctcttcattttctttacgtatccctcaggatccacatcatgggtctactttctttcaaacaacttttaccatatgctccagctcacactaccatctccctacctcctatgctcacaacaacccctcatatgacttacattaaaaagtttacaattattaattaggattggaagtttccaacagatttgtagtcaggagagactattcagggaacatgagtctagttttgatcacattgagtttgaagttcctgaacaaacacgtgtcactaaaggagtgaagataaacatgcttctagagtaaaaacaatcacaagtacaaacctctacaacatcttacacagggaaattcagccctaaagtctatcaaatgggcataaaggtaattttatatttgtataatcttaggttatagccaagaaaaagcaaacatcttgtgaagttgagatatagcatacaacaaactcagctcaattaaaccacagtttagctttatctaattcaaagttaggacgcctttaacagtaacttgacttgcaacttctaagcttaaaagaaattttaggctgggcgcagtggctcacgcctgtaatcccggcactttgggaggccgaggtgggcggatcacgagatcaggagatggagaccatcctggctaacacgatgaaacccagtctccactaaaaatacaaaaaattagccgggcgtggttgtgggcgcctgtagtcccagctactcaagaggctgagacaggagaatggcgtgaacccaggaggcggaggctgcgatgagccaagactgcgccactgcgctccagcctgggcgacagagtgagactctgtctcaaaaaaaaaaaaaaaagaaagaaagaaaaaaagaaattttccagattaaaacaaatgtctggaaaccttaaactcaacttcttcctgccatcaaatataggcctccttgatcgatttctccataacaagaggaggtcataaaaatcattcacggccatctcatttagttgtctcttctgcaacttactccctaaactctgtgcttaaataactattctcctgatttttccgctgtaggtcttcccactatggaacatgagcccacccctttcccttcccaccatcctactggtatggttttaccccatatatggcatctgtattgtgagtctgccagaacgctcatacttaggcgtatttttatcttcgtatcttacaacgctgttattttgtacttttggcttttctttgtctacagttaatatttgccccatttaaaaaatttgcctcattttctatgcatccatcaatactgtatctttcccaaacgctccagtagaaccctaagaagcatgctaagtacaggaaaatctttaacgcaggtaatgcatcaatgccattttttcctggaggcctctctcctgcgaccagcctcgttcgtctcctccaatctggactagctgctctccagacggttgcacagctgttgcctgagatttcccttcactatagggtttcaaagccaaagcctaagactcactgacaggagaaggaaaaaaaaaaaaaaaaaaagacagacactcctgggatgcatcaccaacaagttgaaatttatcaggggatatggaagagggaatgtttaatgaaaccactcagtgactaatatgataaaagagaaagacgacagaatttatcctttcactgaacactgaaacaaatattgagaaccttctttgtcaagtactaaaatctgaatatttcctaacagcctttgacactgaaattaaaatacgtcttaatccagactgtagattcatctttatgtcgtttcttatatccatgatgcttatttgtgtacctgaaaaaaagcatattcttttcctcagtgctaattgagaactggctttaaaaattcattctttatttaatcacaaacatcaaataactttttaaaaatataatacgtgagaaaaaaattgtccttaatttcatttcagtattcccttcataataagtaaataaacagttctgcttttatgggtattatctggaattataaagatatgctgtacctaattcacaatagtaaactgaaaaattttaagtccacaaagaagcacttgtttagttcttttcctagggaagaaatacatcaaaagttcccataatttattatgagaagtctatgtctaatatattttacatatttatatactatttttaatgtagttcattatttaaaacataatgaaagcttgggtttcatggcaaaggctgaagttaattcagttaatgccattattttatgttgtatgtaagctactcttctaccccaagaatcgtaataatagctgtctgtaccactctaaacacttccttaaatttcatattcttcatctggctacaattatccacatggcataaaccatagagctctcaatcccaaaatcttaagttttgtcacacacaaattctgttttctactacagctgtctggaaagttatttactggcttgaatggttaaaaaaaacatcaaactcggcagggtgtggtggctcacgcctgtaatcccagcactttgggaggccgaggcgcggatcacctgaggtcgggagctcgagaccagcctgaccaacacggagaaaccccgtctctactaaaaacagaaaaatagctgggcatggtggcacatgcctgtaatcccagctacttggcaggcttaggcaggagaatcacttgaacccaggaggcggaggttggggtgagctgagattgtgccattgcactccagcctgggcaacaaagagtgaaactccatctcaaaaaaaaaaaaaaaaaatcaaactcaagacaatatctcaagatttttatttgctttggaaaatgacacgatgagaagagggttctgaagacaaaggggaaaactgtttcctttctctgcttggggtagggactgatggaaacacagtgcttgagaaagatgctcagaagcggctagagtagaaaaagaactttgaagaaagtccactttcttctttgattcctcatcataaccatttgtaatcatttacctcagaataaaagagaaaattccacgacaataaacacagcttgaggttagctagaaatactgttcacattaaatttatggtaaaacagcaagctgaaatggtgtgggaattatctaataatttccaagactgaattacgcagctataaagcaacagcagctgtttactggttggcccagaaaagttcacatttcagaccaccagatcagacataacagtattaattcctcatacagggagaaatttttgaagactcaacataacagaaatccagtgttcagctgatacgttattaaatctgacggcatttttatggcatttttaaactatgacacagcttcaggaagtcctgaaaacttgagcctctaaaggcatttttgtcttttttatacaacataggtgcaaaaagctgaaaaatgtgaccatgaccgtgtgaaatttaaattataccttactttttatttttacttctgtggatgccagtgtctgtcttagtctgtttctccctatatacactgtatatggaaaccaactaaaagcctatctaggccgggaatggtggctcacgcctgtaatcccagcattttgggagaccaaggtgggtggatcacctgaggtcagaagttcgaaaccagcctggccaacatggtgaaaccctgtctctattaaaaatacaaaaatctgctaggtgtggtggtgcacgcctgtaatcccagctactcgggaggctgaggcaggagaatcacttgaacccgggaggcagaggttgcagtgagccgagatctcaccattgcacttcagcctaggtgacaggagtgaaattccgtctcaataaacaaacaaacaaacaaagcagcatccataagaaattaacacaaaatatgtttagctgttcatttgaaagcaaatgactggggttataattcacttgtaacacttaataatctcaaagttttgatttgtgaattccattatctcttggagaaagctacaacacacatataattagtggtctaactcaaatagtgctggaatttcctatagaaatggctaagcatgaataaccaaagtcgcaggtgattcctaagattctgctcattttttaagtttttttttaagttttttgtttctttctgctcattttttttacatgactgaattaaaatagcttttaaaaaatttcctgctttccgccgggttgtggtggctcatgcctgtaatctcagtactttgggaggctgaggcgggtggatcacgaggtcaggagttcaagaccagactggccaaggtggtcaaattccgtctctactaaaaatacaaaaaaaaattagccagtagtggtggcaggcacctgtaatcccagctactcggtaggctgaggcagagaatggcttgaactcaggaggcagaggttgcagtgagccaagatcgcaccactgcactccagcctgggcgacgaagctagactctatctcaaaaaaaaaaaaaaagaaaaaaaaatcctgctttccaaagattactggtatcttttactggaaaatggttcctaaagaccataatctaggtgcagtactggtgtttaccgctactgagttggtcttttaggccttttcattatttttaggcctgcagcggacagtatttatggggaaaaaatgttatctgaaatctacaacaatatgttatactgagaaatgatacctaaaagtcaaactcatgactacagggtatctttttaatagattatatgttacatgtgaatcttcttttaccacatcaaaattctgattctcaaatacatgggatgattgaattaaaatatcacacaactattcacttatgttacaccatattacttatgcaccaggctcagaattacacactaatactaccaccattaatagaaaaacagttgtttctttacccacatcttcttctcattcttccccattaaagttactgtcacaacaaggctgtttatttcacctgggtgcaggcaggctgagtccgaaaaagagtcaggaaagggagatggggtagggccattttgtaagattcgggtaggtaaaggaaaattgcagtcaaagggggttgttctctggggggcaggggtgggggtcacagggtgctcagtgggggagtttttgagccaggatgagccagaagaaggaatttcacaagataatgtcatcacttaaggcaaggaccggccattttcacttcttttgtggtggaatgtcatcagttaaggcaggaacaggccattttcacttcttttgtgattcttcacttgcttcgggccatctgggcgaatacgtgcaggtcacaggggatggtttagcttgggctcagaggcctgacagttacagaatctctttattgtcacagcatgtagctgtggaatactatattatcatactttttaccatcgttgagtcttagtttttatgtttctccttaatgctcattacccatccttatatcagtttttctctaggtattttgggtatctgaaacttgttctctagcagattctacaggaaaataatgtgaaaatatgccctgagttattgtacgttgatatttatttcatgtgatcatatctgaatgtcagtttgattgaatataaaatccttgttttggctgggcatgatggctcatgtctgtaatcccaggactttgggaggccaagatgggtggatcacctgaggtcaggagtttgagaccaacctggccaacatgatgaaaccccatctctactaaaaagacaaaaaattagctgggcgtggtggcgggtgccagtaatcccagctactcaggaggccgaggcaggagaatcgcttgatcccaggaagtggaggttgcagtgagccgagatcacgccattgcactccagccggggcaacaagagtgaaactccatctcaaaaatgaataaaataaataaataaataaataatccttgttttgcattggctttctttgatatgttaaatgttgctttattttcctttggcataaagcactgctgtcaaaaaactcttattaaaatatagtttctttgtaagtgaaaaacaaaaatatttcctgccctcaaaaattataaacttagttaccaaaaagcaaaaagtactatgtgtatacataaaagcaatatacattcattaccatcttgaaaacaattatttggatataaactttaaaattataaaataatagtattcattataaatgaatgaaaacagtaatgatttttaaaaactactactcttatcatgaccaattacctcttctttttgaaaagtgaactagttcctaccttaaagactttgttgaccctctgtctgaatacctaaaatacatctcctttcttgccttgaaatcttatccttgaaatcttggctcacaatgctacttcctgtcaagtcttccttaaattcctgagctgaaatcccatccccttcaggcccactatcaactctgtaagagggaggcccacatttcacccacctccaggggctcacacactgtgggtgatcaataaaacgtacacaatgaatacgtaactgaccttttattggtcaattttgtaggacttatttctctgagaatattcaattaactacttcctaaggtggaaatttggaaaagcaatatttaaaattgtttaaatagatttaaatagtaattattttaaatggccttaagtagaaattacaggcgcttttactctatcaataaaaaaatcatagctaaatgtaggggtatccatgcttatgttaaactcaggatcataaatcagtattaaaattttcctccatattttcataaacaattatgtggcgcatatattttattacaccaactataagatttgcaaggcattccgccaataactgttatataaaaatcaactaaacacaaatttatctaccaggatgtttatcacagcatcatttataacaactattacaccaccacaaaataaagaaaaccacctaaatgaccataaaaaagagtaaacacattacagtgtctggtgtgatgctacattaaaaattatgctctccaagaatatttaatttcacaggtagagtattctaaaaatgttaggtgtaaaaagcaagtcacaaaacaggaaacgattaaataacactaaaaacaaaagcaaaacatacatgaaaaaaatgtagactgcaaggaagccaaatggttttgattatttttagctagtggttgtattttctcaactttgtacgttgaatatatgttacttttgtaatcagagaaatttcttttgagcacacatttgcaattcttagcatgtactacaaatcagatgtccattagccttgctattcatttttcaaagcaattactaacaagccttgggacaatatcatgccaaataagctgggtttctttttctcacctatcatctaggacctacagagatagataaattctgtgcttcaagaaaatatcagcaaagcccactcataagccataacagcagtttttcaaaagttatcgtttctttttaatgcctcgttacttaatgacacctgaatacaactccagtaaagaagacaaaactgaagatgtaatgaagtataaatcacccatgctattagagctcttatcaatcaaaacattagttgttaaaagtcccagaaagaggacacaataccaggtacaataattaaaatgaaaagaaacaaaactggaaacggagccaagaaacaccactacgcttccttcttttcaaaatgcgattgttaaaaaagtcagtctcctcaactcatcctctgtcctgagttttagaaagcaaatcaagcaggagccaatgcaattgaggcaattatggaacttgggacagggccaaggaagtgctgcagtgagccatggaggatgacctacctagaagggctccatttttttttttttttttttttttttttttgagactgagtctcgctctgtcccccaggctggagcgcagtggcgcgatctcggctcacggcaagctccgcctcccgggttcacgccattctcctgcctcagcctcccgagtagctgggattacaggcgcccgcaccacgcctggctaatttttttgtatttttagtagagacggggtttcaccgttgttagccaagacagtctcaatctcctgaccttgcgatccgcccatctcggcctcccgaagttctgggattacaggcgtgagcaccgcgcccggccgaagacaccatttttataggtgttcttgcttaatcaaatggaagagggcttcactttctaagtcttcctcacccagaaggaatctgtgagataaatgtaagctcttcccattcttccttctggcctgaaacaaatgtggctgccatatgcaattttggagggaaaaaaaattaaggaagatcaagaatcttcctgaagaatcagtgatgattaatgctgcttaaattttgttgaagatcgtatgaatgaacgttattttcttttattttggcatcatggtgttttcaaaactaaagtgtattttcccatactgtatgtataaagctcataaagtacaactaccaagagataaaacaaattaatgatcattctgtgtcgactttcaagtcttttgacttttttctattatccttcaatggtactacatacaaatacaaaattatatgtactgatttcatagtctatcttttgctgattataaaagctactcatttattatacaaagtcatagaaaattgcttaaataaaatcaaaatcacctgtaatcccactgttgggagataaacactgataagatttcttttccggacatgttttcttttacttagtatgctggttctgaagcatgattaacgttgaccattcaaaggtcccatgggaaggccacatataaaggagtctgatgtctctccaaggatggctgattagcctttcctgatgaagaaatgcccagcaattctggtcattccttatgagaccatgatgtaaacaatcaagaacattcaagaatttgcatccttcttgtatgcagcagctgggctcattaaataatgagaatgatgaagtcatcattctcatcacagtgcatgtataggtcccacacatgcatctcccatgacttcaaaattagtaggatttccacagtgcaggtcggtggggagaggaggcgccatgggcaccaattctctagcacactggattacatacggggatttacaagatccttaaagtctacaataaaaatgtttttccatcctcatcgccatctttaaagtttggtgaactctcatgtgacatttctgactattgtgttgtactgatgtgtctcaagagagttgttgtttacataaattcaaagaattaccctggtataaaatgtcacagtattcaaatacatcctttccatgctaaagaagatagctgtagataattgatacaaaggcagccaagaaacccagaaaacaaggcatgcttttcctaaaattgtattaaaacaataaaattcaaaattaatatgaattgaatacctttctcatttgaccatatctgataagatttctggtcattactacttacacatttggaaggtcttaattacaaaatgaaacagaatgacatttaaggtaaaattctttcacttgtaattccttttttggattaagctattaacctgactttgccccaataattcaacagtaatttattttacgcaatgttccttgcctttgctggtcagagacaagtacagaaaagtgccaatttcaacagtggatctattacaccatgaagagcagtcattcaaatggaaagggttgaaagctttgcaaagaaaatattctccttgagtaacagtaatgatgtgcttgaatcacacatgagataattaataaaatgttcacatgattaagatgaatcttaccctctggttccagaggtactaccaaaagcaaagggtgagatgagaaagccaacttattctcaagggaaattatccactccatgggaagaaagtggcaacagcaacctgacatactttccccatgcagacaagaaatgtatagcacatatgtccgaggcaaaatattacagaaaaataatccagtgccacactggatccttcatctgataaagaggttaggaaggttgtatgccacacataacaagcatttttctctcttcaagctttgttttgaattttaacacgcttaatgtttaagataattttattttgtttgctaggtcagtaaaaaaaaaaaactcttgtctaaaacatatatttggatacagtcaagagattttagagcatacttatgttaatgctgaacagtaattctttgttaagcaggaataatatgtaagaatgttacctactactactataaagtagaaaacatatcacatggagatttatcctatactaggtcatggttgtctcctctgtcaacacaacgatagctgtgagtttcttttttagtgctattgtctctaattcatagtgaatatttgttttaaaacaaatttttgtgtatactgtaaaaaacactggaccaataatcaagagagcttggactgtagtgctgactctcccatttatttgctgtgagttatagcaagaaattcaacctctctggatcttggtagttgtatagcctgtgaagagagacgaagaactaacactgcctgtctattaagtgcaagtaaaatgtacatcagttacacctatgtccctatgttacctatgttacacctattggaaaacctatgtttttcagttccttttcctgaaagacaaggcatgctctacatactctaccaggttattttatcaactctgtattatactctgggcttgagacctttggaaaatttgccactacctaagaaaaaagcagcacctatattccttaattctaatctaaggttaataacaaagtaagagacaacatatgctctacttgtcatattagggtctaatttcaggtccaatggaaaaggaccagtgattcataaaatgagaaaatatggtaaaatgattcaacacgccaagtacctacaggaaatagcaaatgattatctagtcccatagtagtcaagaacagttagtgtcaacgtgctcatttcacatcagacacaaccagaactgagaaatttgcttaacatgtcacaagtgacccaactttttgaattatgtacctccacatcaaaggagcccagaatctgttcggaggatgaaagagaaatctgataatggttgatggcaaagccttggcaggaataaactccttccctgagaaagaattattttataggcttctctccatttctccttgccagtctccagcctgtgcttcacagctgggtaattatctgtcagtggaatgatatattttcaagtggttctctttccataatggttaaaaacataaggtgaggacaggtcattaactttactatcaaacaggtatttggtagatgagattaattatttaaaaccacattacttaggctgttgtttccctaaatggtgcataatgcagtgtagcacaacaaatacaaatatttggacagtctccgtgtaattataatattattataaaatcttctgacttgatattgagatctgagaacatcttttatatcctttattacttgttgtactgttcgttcacttggaggtttttttgtttgtttttgtttttttaagagacggggtctcattatgttgcccaggctggtctctaactgctgggctcaagcaatcttcccacctcggcctcttacagtgctgggattataggcttgagccaccacacccagtggaaggagagcttttcagagatgaggaggcttgaagagcaggggcaaaggaagtgatcaacagataggataaaatagacctggggttcaaaggatatttgctacaacaactggcactaggtagtaaataacaatcttaatgtggatttcatctttccatcaactttaatacaaatcattctgaatagaatatgaagcagaaaaatctatgtaaaatgataagttcacttctgaaacatgactgcagttttgagtgtcataccaggagcaataatgcccatccaaagccctacctgttctcagtgagcttacattctaatgaaaatatatttggaatacttcatagaacaggtaagtaagaaccaaaagaaacaaatcattaacaaagcctggcccatcaaattaacagactcatgatctacttcctaacttgtactgaattgttcaatctctgtgtgttatttcttggtgtaataactaagtgagtataaaatacacagttcctggggacagatgacttctatatttttttgagtaggagttctgtatctagaatttaagtgctgcttattttcatctaattaaactgcactttttgatgaaccagaaaagagttgaggccttataaagcatataggaacaaggaataaggaggaaaaaggaaactcttgaattatcagatgtttaagaaatctagttttctacactctcttcatcaattacattgtaagtaaattcaccaggtgaaatcttctttctaatgcccagtgttttcattttatgtctcaaattatgcacatgaatgaacagcaatcagtatgctcttaggacattcatttttgaccatatattacatagatctccggaatcttcagtaaatatccttactttgtaagtttgctgttggattttctttgaaatattccttttaacctttataagaagtcatcagaatatacatcaatatttgtccacaatctccacagacaatctctatatccttatttacaacctgcctactgatgaatacacttgtggaaaacatctagatgtaagataccagagcaaagaacttgacttctgcaatgactggtcacataaaaacaacaactaggaacagactaataaccaagttagattaaatatggagtatgacagtttccagaggaaaagagcacgataccacataaaactactcaatttttttaaataaaatgttgaggtaaatttgaggtttgtgacaaaacaaacattaaacattagtaatcagactgtttcctccagtttgatgtaagcagaaaaaaagccttcccaattccaattcctctactatcaccaaataagaggagtagttattgtagaacagccttttttttttttttttttttttttttagaaattaacaaaatgctgcagcttcacattagattctttcttctagaaagtctatgtgaagaaacacacaaggcccctgttcatgagaatcatctatgcgatacggtaaaataagaattcccggatccgctactataggcatttttcattcaggagtcctggaactggcccaggaatttgtaatttcaatatacaccctgggtaaattcattctgaggcagggaactcaaaaatactgctcctatagggtcagtgcacagaatgtaactgcaagagtccaaaacacagtacaacacagagtggcaatgtgctgaagaacaagtctgtgtatgtgacctaacaggagcatcctctttttcttccctcaagaccaggcccccaatcaacaccagccccacggccggccggctcacctaagcagcggtagggaatcacaaagtggggatgggtcttgcactgcttgcggccccgcttgcaccagttctggatggtcactggttggttggcttctaccacattggtgatctgcagttcagggtagacctgggagagcacacaaaaagaatcaattgttacttgaggcaggggctggcatttacaagcatctaacaagcctccactgtaaggtacaggtggagtgtcccttatccaaaatgcttgggaccagaagtgctttcaaggtctctgactttttccgattttagaacatctgcattatatacttactggttgagcatctggaatccggaaagtccaaaatccaaaatactccaatgagcatttcctttgagcatcatgttgacatgcaaatagttttgggtttttgagcatttcggactctggatttttaaatttgggatactcaacctataccactatccactaagagtcaagcctgctctacctctgaccaagctaaagaaattcagtacaaagaaaaagatagcaaatgaacaagcatctagctattccattcaaaatattaagcaatgcaactttttaatttattgtactcatttagacttaaaatattatttttccaggggagctaaaatagaaacaagagggggaaaggaggattcttacaagcatggggtgatttttgatgtgaaataaattggtgtaggataatagtctgtaatgtcctaaacaaacgttacagtagatatggctggggatattatgtttagtaaaattcaacctccccctatctctcactaatcggacaaacattttacaggatatgacacatagaaagctttctatataaaaatcctgctcttattccaagtaatttacatgaaaataacttatcgaaaagttatcaagggtgtcatttagataaaaataaactcatgaattctctttgctcctataactaactacagccccttgctttgattactgttgtgaatacatcatggtgtttaactgagcacttagaatgaaatgtgaaacttgatcaattaaatcacatttgtgaaatatcaaaccacttctatttattaatgagtagagatttgaaagaaaaacataaacataaaaatctatttcgaaaatgtgcattcccttgcataaaccttgcattgcaacagggtggttgttttgccagataaataacaacgaatagagaagtgacggtataagcaagggaatgattagaatgctgggccatgcaatctcaagtggcaaaagtgagaacatgaggggaattagacacaggtaaaaggtggtagggaccagtggaatctgagtccactgatcacactccaggggctaaagaatgtatggcgcacaggactggagaaagtgaggtggtaataagtagtacttggagagtcaaataattgaaattaaaattttggaggagttgcagtgattggtcattgcaaggagtataatatgaccattgtaagcaatgggtgatggagaatgatgaaaacaaggtcactggagggatgagaatcatgaactgacaaattggaatactggaaggatcattgagatcaatattaggatcacttaagaatcagcaaatgagcagctacacctgatgacagcaaggcaggagctaaaatcttcaaagtctgaatggtgaacatcgatgaggtagaaagaggtctggagatgaccaacaggtggaggagcaaagtgatttgtctgaaagcatgcacttcaagctgaggtaggggggcttttagggaagagaaaggaagagtggtttggaaacaaaaatgaagaggaaaagaggaaatgaagaggaaaagaggacattcccacctctaggggcaacgctgtgaggattttgagaaaagaacttcgacctgagaaggctacaggagaagtagtgccttccttggagggagaacaaggtttctgagcaagataacatccatggggagttagacgatacacggaatttcactcacaattgtccatgacattcagagggcttgacaaatctaaattaataatcccttatctttgaataaaagtaactgaatcaggctgaatttactgcttccattttaataaggcagtaggagaactatgcatggcttgatgtcaattgagcgtgactcaatctctgtctaaaaagttgatattttgttcatcatggagtttttttgcagtaattttgatttttaaaaatattacattaaaaattcttaatctcaattcctgactgccttgtttacctcaccttagtcccagaccccaaaaaaatcagttaaaaaataaggtactgtgaatgaataaataacactgtggggtacacacctagaaaatggaatgtcattcaacactaaaaggaaatgggctatgaacccatgaaaagacatggaggaacttaactaatattgctaagtgaaagaagcccatctgaataggctccatactatatgacattcttcccactatatgacattctggaaaaggcagaactatggagactaaaaagatcagtggttgccacgggtttgggtggttgggggcagggggaggatgaacagatagagcacagaagatttttagggcagtgaaactactctgtatggtactacaatgatggacatatgtcattatacatttgtccaaacccaaaaaatgtataccgccaagagtgaaccctcagggaaactatggactttgggtgctaatgatgtatcaatgttggttcatcgattgtaacaaatgtaccattctgtgggggatgtttataataggagaggctaagcatgtgtgcaggtagcaagtatatgggaaacctctgtaccttcctctcaacttttctgtgaatctaaaactgctctaaaaaaccgtctattttaaaaacaaaaatttaaaaataaggtatcaatcagtgtagcagcaggggataaactcagtggtagaggtatatgctaagagaacacacaaagaaatctctaaatcagaatcctggggtgggtgctgagagagttattcttgaaaccactgccacagtaacctagctccaaagggatcctgctattaatacttctctttattttactttgttcttaagtatcttaatatctcaatgcaggcactttagatcacagaaaatgctctaaaaatgccactaaaaatttaatattcccatggcttttttcctatataatgaaaggtgaagtggctttttgtacaggaatataattctcccaccgtctttacttgtttattagatcacaaagctgcagcactcatgagtcataaactgtatgacacctgagagtccaccctgagggacatgactttatgtgcagtaaagtgtgagttactgcatctttctaaagggttcttttcactgaaagacaaccctgctgagaatttcctcaggagtcatcggttttctataaacccagtggcaggcatattcacatcatggttccctctatacaacttaaaaccaacgaattgtttgtagggtacaaactgattaccaggagaaaaggatctctttttcatgttggttgcataccatcttcagattcctatggtaatagttggtgcaacagggcagtaactgattaggttgactatttccaagtaggtagaattgcaaattgacaaattaaaatccatgaagacggggcttttccctaaagactagtactagaactttatacagtgatcagccaaacacagaatttacttccagttcccaccaggaaatctagaacatgcgtgttattttctgtgcttcagcttctctctctataacaccaacaatgacaattgttaatatgcagatggatgtggagattacaaaatttgaaccaggccggagacagtggcacacacctgtaatcccagcactttgggaggccgaggcgggcggctcacgaggtcaagagatcaagaccatcctggccaacatggtgaaaccctgtctctactaaaaatacaaaaattagctgggcgtcatggcacacgcctgttaagtcccagctactccggaggctgaggcaggagaatcgcaggaacccaggaagcggatgttgcagtgagctgagatcacaccactgcactccagcctggtgacagagcgagactcggtctcaaaaaaaaaaaaaaaaaaatttgaaccacataaagcccatgcatagttttttcctactgtcctattaaaatggaagcagtaaattcaacctgattcagttacttttattcagagataagggattattaatttagattttccaaacataatgcaattttgctgttccaacatcaggaggtttatttaagggggagaacattagcaatcaaggtaacaaaacttcttctgaagcagagcaagacccttttgataaagcaactgccacatgcacagccaactcccagctcagaaagcaaacaacgaaacaaaacaaaaaaagaaacaaacacgttaaaatttaaaattccaacaaaaattcccaatatcatccctaggtttttattaaataaccccagtaaacatccagagaggaaaaaaagcctttttatgtttacatagatataaaaatatttatatttatataaaatataaatatatagctcatttataaagatataaatatagttcatttatatttaaagatataaatataaatatagttcaacattttagacaagaataaaaatttcatcagaaatacaaatgttctcgtggctagattaagttcctgatttttatcataactatagtagtcctcccttatctgtggttttgctttccatagtttcagtccaaaaatattaaatagaaagctctataaataaatgagttttatttttctatttatttaattaatttattttttttttgagatggactctcactctgtcgcccaggttgcagtgcagtggtgcaatctcagctcactgtaacctccatctcccaggttcaagcgattctcctgcctcagcctcctgagtagctgggactacaggcacccactaccacacccggctaatttttgtattttcagtaaagacagggtttcaccatgttggccaggatgctctcaatctcctgaccttgtgatccacccgccttggcctcccaaagtgttgggattacaggcgtgagccaccgtgcccggcctatatttaattttaagaaagagatagggtcatcctatgttgcccaggctggtctcaaactcctggcctcaagagatcctcctgtcctggcctcccaaagtaccaggattacaggcatgagccaccatgcccagccaacaataagttttaaattgcgcaccattctgagcagtgtgatgaaatctcaaacccacacagtccagaaagtgaatcatccctttgtccagcgtctccatgctgtacatgctacctgccattgatcacttcatcacagcgcttgtgttcaagtaactcttatttgacttaataacggccccaaagtgcaagagtagtgatggtggcgtagtgtcataattgctctattctattattagttgttgtgaattacttactgtgcctaatttgtaaattcaactttatcacaggtatgtacctataggaaaaaaacatagtatatattgggtttggtactatctaaggtttcgggcattcactgggggtcttggaagttatcctctgcagatataggaggactactgtaagtatcggttcaatgttttaatattttctttgcagcatctcaaatcttacataggaaataaagataaaagttccttaagctgcttaatttgcatgtgttttccaaaacatacatgtattgctaatatgacaagcattgcaaataatttgctaatacagcaaacattagcaaatcctaactctcatactccccttcttttctaaaatgttttttatgtgaaacccaattccaactatttccttgattttcctttttaaaaaaggactcgagatacttatacttaaagcagaagcaaacccaagcctctgtcagctagtagaaaaataagctgtcctcaagtcctacaaattttcctaaattatagccacacagagcatttgctgtataaatacgtacactgtgttccaaacacactcttacctaagatcccttagactacacttcaaatgcctacgcccattagggtccccccacatggacaaacctcctctgcacacagtgaaataatgctaacccctcttacagaatgttttctggtatttatcagtgtgcctcacatcgctattaagtttgtatctgtactgcctgcctggtgaaaagaagctttcctcaagggcagaaaacataacgtggcatgttatagcctccccgtggagccccacatccatcatctttggctttcagactatcaggaggctgctgacccccaactccttttatgtggtgctcccaccctcagctctctgaaggaggactcattagtgactgtatttcaaactctgcagcaccatcccctatagcttattagagcccaagaaaaccaaactgtacgtagcattctttccctcaagggctttcacgaacacacaaaggctgtcgttagataaggaagaaacttgactggaggtgagcataagtctgagccacaggtggcatgtcaacacccatgggtgcatggtggcttgcgcctatagtcccagctactcgggaggctgaggtgggaggacagcttaagcgaggaggtcgaggctgcagtgaactgggatcacgtcactgcactccagtctgggcaacagagtgagaccccgcctcaaaaaaacaaaaaacaaaaacagaacgtaacaaaaaaacaaagaaaagcccccaaaaaaccatgggtggactcaaactaggcatctggaagaagcagttagtccaggaaaggaaaacagggaatactcagagagacaagggaagatgagaaacagacaagactggatctggcagagaccggatctgacagggcctgcctgtgccctctaactcttttaagtcttgggatgtgcatttggattctaggagatgccttgtccccttcaataagccctatttctaaacataagctcctttagtagctttatgctccttccaattgaacaaaagccaagaaaaaggcccggcttgcatgctagttcactaattcccaccacatgatgccctcaatctctgtgcgcagaccattctgtcctaccactgcatcctccacttgccttgatcactttatctgatccctgaccacttgctacctcctattctgctgatgggctgtctgtcctattagaatatataatccttgaaggcagggacaatatgattcatctggtgttccctcaacagtggcaaaccctgggatagcacagtaagtgtctgataagcatgtaattaatatttctggttaaggtcagaatccattcaatcagggactttcagtatacattaagttccctttgggtattataaacctatctcttaaataagatattctaaatagttgttggattatgggcttttgagggaaagtaagtatctcaatgcctttcaatattgttcttccaagtagatatggacagcttatacaaatcatagcatctgctataagcagtagattactgtaaataagcactcagctgaggaaggcatttaggaagagtgacaagttaagctctcacttgggctaatggggcccattcagttagtacaggagtctgaaaagcagcctacctacctggtcatacagccatgttttatcattgaaagtgaatgtatcagtacatgaaataattttaagagtgcataggccgggcgcggtggctcaggcctgtaatcccagcactttgggaggccaagacgggtggatcacaaggtcagtagatcgagaccatcctggctaacatggtgaaaccccgtctctactaaaaaatacaaaaattagccgggcatggtggcaggcgcctgtagtctcagctacttgggaggctgaggcaggagaatggcgtgaacctgggaggcggagcttgcagtgagccgagatcgcgccactgcactccagcctgcgaggcagagccagactctgtctcagaaaaaaaaaaaaaaaaaaaaaaagagtgcataagaaattccaaatcctaacaaccaggaaagagggggaatagaaacaatcttagatcatattatattaatatttttatatataataattattattaatattaaaagcttatcatcggtagcctaagtagttttgtctactgaagaaataccttaaaacctggtcaccatcagaatgttttgttccacattttaaaaatctgaagtctctcttctcactatctctccaagttggaaatatattgatctcagacaagatgacatttaagttgctaaatacgtaaagcaagaaaagacattgatgatatttaagaaagccaagaagagaaatgtatatattaaaaaaaaactttgtaaagccatatgttgtcagagtcctacagaaactttgtctctattcccaacattaagggcaaatggagaaccgaaaagtcccttttgtaaacaggccacctaagacaggtgattaatgccaaaagtcctaaaatgaccaaaggtatttcaaaaacacaaaatcaaacatggctaacaaaaggctgaaaacaaagttaatgaacagagtaaatggaattggaaattgctactaattctgaaaacagtttgcctacttttctacttagtcattcaatttttaaaattcacctttagccaaattcttatttctttttgaaaacgctaaaaattatgtggtactaataaaatgttttaaatatattaacaaaacgtcaatgagtaacatgtgatgctttagcacatcttaatttacaggtcactgaaagagatgagctgaaacccgcatgtgttttgccaggattgctggagaacctgaatagttaagggaaaaaacctgcattccagactgactcaggaacaagactgactagatttgatcattactgcaattcagtgacagatagatgggagggttcattttactattctttctacttgtacatatgcttgtaattttgcatttaaagcactgaaaatttaaataaatacatttagtccagaggaaacagccaggtttctaaatttataactgcatgtgaaaaaggaaaaaaaaaaaaacccagatccaaattgtgtctgcatgactgcagctagcatatatgaatatatacatgaaacagagaatcaaatgctctataccaaattgtttcagagatagcctatcttgtatattttcatcgtctcaaagcttttccataccagtccctttttcaaagaacatatccaagaagaaagtaagaaaaatgtcataactgagggtttcctaagtaccagacatcactgcaaatgttttatgtgtagcacatcataatcctgagttagtaattactccaatttatttaagatgaaactagaacaactaaaatcgatgccatttctaagcattcaaagagtatattaatcataaattttaaactactcggacttaggcatataaaccaagacaaagcatgtcctagacaatatatacttctgtttctggatttcaatgacattctttaaattttcctggaatacaaagaaatatcacatcttaaactattctcaacaaaaattcttttaataatgaggaatactgaaaatacaatctctaacttaattgagaaagagaactggaaaacgaaaacgttctctgcttgcaacttaatgaggcgctgagaggcagcgtgcagctgatgaaacgctactgcaataatgggaggtatcagcatgctatgtttccaaatgatggccttatgtaaaagcaaaggcggtaaaatgctgcagggcgttagaatatttcccaataatctggccaaactctgcttctgacattctatataaatatattgttatatccacactttcatactcagagttggaaaatcctgtcaaagaaccttgtttgatagataagctattctaatttcaaagtgttgaatgaaaaacaaattgtgggtgggagggaagagatgggagagaaataaaaataaataggacaggacacaattgtgaaaacacaagcagatgtgtacacatagcctagattttcctattctctctttcaatgtagggctaattttcttattttaaaatatccaaactggcttcaactttttaaccctagaagaaatctacggtcagtaaagcaatccttacatttatacagaccagaaatgcataaaatatatccacatatagacagcctgatccctccattcaaaaactgtctcactcaatatgaatttgagatctttcaaattccaaaaccacaatgtatacgtgcctatgatttgccaattttcagcctacaagggtgaagggtgcccatagcaaagtaataatggtcaagaatgtaccagaccttctaccataggataatgtatatagtataccttccaactcggtaagattaaaaagactacctctgttgtttgctttttatttaattttaatttcatacaactgtagaatggaaaaagaaaggttgagaaacaattcgtgtctgggaatcccatgttcagttatgtattttagaggagaaagttgggcaaaggaaatggttttgctcaactcatctaacaggcagtttctgctttgtgcaggcactgctgtgctttgtttgctgatcctgttaatctatagattaagcaactgttcatttaaagccagaaggttaaaaaggcagagaacagataatgttaaatggtgggaaagaaaacaggaaaaagagaaaatacccataaaccaataaaagagatgataaagccacgttcacctaactttcccaattggaaatctctgcctgcatttgaggcttaacctgttcaaagttccctccagagacctgccctgcagtgtaagttaccagagacatcaacaccttcaagaagcccctagaccctagcccctagctccaagaagtgcactgcatgttattaaaagaatagagaggctggaagagcctgtttcaagttatctctttttttttcctttttttttttttttttttttttgggatggagtctcactctgtcgccaggctggagtgcagtggcgtgatctcggcccactgcaacctcggcctccgagttcaagcaattctcctgcctcagtctcccgagtagctgggactacaggcgtgcgccaccatgcccatctaatttttgtatttttagtagagacggggtttcaccatgttggctaggatggtcttgatctcttgatctcgtcaccagcccgactcggcctcccaatgtgctgggattacaggtgtgagccatggcacccggcccaagttctctctttaaaagaggaagaatagtatggggactcatccaatttcttgtttaactgacaatatgtaactcttacaacacttgcctgtgtgtttctatcataaagtgaggatatggtttaagactgtgaggatacagtctaagactgaacaggcagccttcctggactgctcgggtgacaaagagcaatgatgcccttaatacagcacctcaggatatcatgaatgaggggatggacaggatgatctcccacaatgcttttcacactattattttgtaatttgaattccttctctccccaatctaatctactcttggaaacaagctaatttttctaaaagtgtcttgaccagaaagcattcatgctaaaaatctgccatagcttccacctatctccagaataagaccctccaatttgcaacctcattctacctttgcaattttctaaattttcttcacaatttaattgtattaatagatttataaggtccttatgggccaagaatggtatcccgccactcagcaacacctgacacaaaaacctaacagtgcccaataaatatagactaaatttgcctgtattaaatttgggaagaaatagattcttgagatgtagaattgaagtacacttcctttattcttctggaatcccaaagcctttggtttaagtaaaactatgtggttttttttttttttttttttttggagccggagtctcgctcttgtcgcccaggctggagtgcagcggcgcgatctcggctcaccgcaagctccacctcccgggttcacgccattctcctgcctcagcctcccaagtagctgggactacaggtgcccaccaccacgcccggcaaatatttttgtatttttagtagagacagggtttcaccgtgttagccgggatggtctcgatctcctgacctcgtgatctgcccgcctcggcctcccaaagtgctgggattacaggcgtgagccactgcgcccggccaaaactatggtttttaaaaaatttcatttcatcccaaagaaacaggacaataaaatctaacaattctaacttttagcccctggttttagaatatgtttcaaggggaatattatttttgttttgttctatttatatttataaattcctcaggccaaaattttggtactataatagtttattaaagcaagtggccactttatgctgttaaatgatgaataactgccaggcacagtggttcgcacctgtaatcccagcactttgggaggccaagacaggtggatcacttgaggtcaggagttcgagaccagcctggccaacatggtgaaaccccatctctagtaaaaatacaaaaattatctgagaatggtgtgggcacctgtaatctcagctacttgggaggctgaggcacgagaatcacttgagcccaggatgcaaagaatgcagtgagccaagactgcaccactgcactccagcctggttgatggagtgggactctgtctcaaaaaaaaaaaaaaaaaaaaaaaaaagatgaataattgacgtagttgtattcgagttgtttccataatgctatgagagatactttttgcttctagtataaataacagaggaaaagcactgttttctatcaaagaatgtcaaaagaaaataacaactcaacagtctactgtggtcatctatgattcacacaaactaccctaaacactaaacaaaaagaacaatataaggattttgcatgcttaatgtgtttggaagcatactttgtaatattacaaccaaatattttaagtcatactatggatttatgactttactattgaattatcatggcctttgcatttgaagcggataaaaacaaactgaaggcaaatctggactacacgccaacattccaccaactcttgcctaaacatgtctttagaattctgtcgatggaaggctgggtgcagtggctcatgcctgtaatcccagcactttgggaggccgaggcaggtaaatcactagagttcaagaccagcctagccaacatggtgaaaccccatctctaccaaaatacaaaaattagccacatgtggtggcgtgcaccttgtaatcccagctactcaggaggctgaggcatgagaatcacttgaacccaggaggcagaggttgcagtgggttgacatcatgccactgcactccagcctgggcgatggagtgagatcccgtcaaaaaaaagaaaaagaaaaaaaagaattctatcaatggatagaaatggtctctgcaaaaggaaagtataggctccattttatgggaagctctctcagcataagctggatacagaactcctgcccattaccgctccaatctctgtgccagaaactaccatccacaagcatttacctaacgacgactagcgtgctctaggtcagagctaagtgttggataaaatccactgtaaggcatgatccctagaaatgttaattctcacaacactttgggtctgtagggcttttgcctacagaagccacagtaggtctttgtcttagctcaaaatgctgccttactgtgaatggcttaaacaacaaaaatgtcttttgtcacagctctggaagctggaagtccaaaaccaaggtgccagcatgaccgagttctggtgaggccgctcttccttgcttgcagacagccacctccttgctgtgtccttatgtgacttcttcgtttgagcagggagaaaaaggcaagctctttggtatcttttcttataagggcactagttccatcacgggggcacatactcatgacctcatctaacagttatcacctcccaaaggtatcatctccgaataccatctccgaatagcctggggttagggtttcaatatctaaattttgggggaacacaaacattcatcccataacagtcctcaatacatacttgaaaaaaaaggggggaaaaatctcaaatggtgctaacacaaaatattttttaaatgcattgaaaggcaggtatttgaccaatgactaggcagaagcaaaactattacgattgggaaagaggaaagaatacataagcacaaagaatttggaagacttgggattaaacaaagactcaatttaaaccataagatccaagttatcttctcaatcaaactttacaagggtttataaccaagagcaaaaataaaagactgtgtttttactttttctcttgaaccttgcccttgaccaaaacctggatcaaagaatcaagggcaaaaaaaacactatgaatgataacaacaaaacaacccagtaacacaaaatacaaattcagagaagcatgagactatgaaaggagcagagtagataattcacagtcaaagttatgtatttatcatcatgttaagctatgcaccaacatgtatactgcaaagcaatcctttggaaaaacaaattaaacaatgagttaaacttgtgagcaaaaagtcaaaacgacgtgacggtgatgagttctgttggttttgttctatcctaggaccagactgttaacagccacctcagacttagccagctagttatctctaaaatattttggtcatgagagacacaaagtgagaacgcaaagtaaaaaattcatccaccactattgggagaaaaaaaaaatcattaaatgagtagctctgtcaatggtaactaatggtttccacgcatttttttcaaaaaaaaaaaaaaaaaaaaagaagaagaatttgcccaatgacagataccagaataccgtgaattttcatggtgctgaatcaaacacccatcaaccaggaattctatacctaatgaagcaattgttcaataataagaaaaacattgttcaacaataagaatgattaagatgaaagtcatccaacaaaacggaatcaaaatattaatgtaatacagggtttgagatgatctgatgaaaagactagctgtaaacaatgagtccagttaaagacagaccctatgaatgagaagtatggcaacagaggagatggtaagattataactttgaaaatataaaaataatacaacttataaaacctgtgagaaggaaacgtggtaacattgtgagagtattcttttccttgccgttcctagcaatgaatccatcaatacggtttaaaaaataaaaacatgaagttaaaaaaaaaaggcaaaacgaacactttccaacacacgcatgaaaatccaagcctacaaatgagaactattcattatttctaattataaaagaaaaacaccagaatagctacaatgtggaaagtggcaggaagatcctgaaatatctataaagaatgttctagagaattcaagatgcacaatttgaaagaaaatgtcaacactgtctaaaacttctgagtgaacttgtctcccctgccacctgctcaatactccccaaaaagccacttaaaatcctaatgcatgatgcactccctcacctcgccctgtccagcctacaagccttttctaatccatacccactgtgttgcagcactggggtcattcttctattttgcccatgccattcctcatccctcttctggcaacagctcctctccccacatcacacggccacacccacaaggccaagatgggctagtcctgatactgagtccctgcagatacggtggtggctccaagggcagacgtgtaactcaaagcagtgccaaccagaagcactccctgataatgcccatgggcagaacaaagttgggatgccaaaccaggactaacactaccagaggtcgtggctaccaacatccctggtctccttgaggacacccatcttagcaggagaaaaggagtaaacacacagcaggaaggtaagcagaaacaaaagagaccctaatggggaaattctaggcagtactgaccctcggttccagcacctagggatctcatttctgtgtacatttttaagaaattgggtaagcatcccccacactacgatccttcccatcagtgggagaaaatattctccatatataaaatacaaattgtttagggggtttttatcacctggcaaaagaaactgcctaattaacccaccctatctccccattcttcctcagaaaaggagatgttccctcccctttccaagacccaggcaatcacatatccactggatctcctttctgcctagttcttacagaactgaataccatagtcatagcttactgtaaccttgtactcttgggcccaagcgatcctctcactcaaagcgctgcgactacaggtctgagccacggagctcggccaaaacctagttcttaagagatacctgcaactagtgcttaggatgggtatcagtccttcccacagtttagtttaagcttccttaggcccaaattccttccatttaaaaatcaaaatcacaaagcctttccttttgtcttcaatgacctcaaagctttttgcctctaggtctttcctccaggagtccacagctgactcaccattgacccacgttgtttttcctgcaatggactacaacgtaacttctccccatgctattccacagggtcaacaatgaccttctatttgccagatcctaacaatgttttgtcacacacacatacaaatgtccaaaaacaagatatgagcaaaagagattgctgggtgtcctagcattgaaatgcaggtgttgtcttgcagaccctgagggtggcggggaaaggattatctgattctacagcatgttcctccagttgacttgctactaaataagctattttacgacttacacccttaaaattcttacacccttattacttacatccttacaagctattccacacccttagagctttgtaaagatggatactgcagacaccccatagcaatgcaagtgttcctgtaccatggaaataatttgacgatattccagataattccagatgattcctgttcatagccatgcaactcaagtgtgctggggaaggaattttaaatctctccaagtcaaaatgaaccatttttcacatcttacagttcatctcattaatgaattgaataaaatatttgacatgtgttcagtctgcatgacagacatgattttaccatgtcaaaaactacacttcaactgctttccgtttgcatcatgcttgcactcttatctttcccctcatttagaaatttacatggcttgccttccagcatgtaacgcctcctacttcctatcctatctctctggccactgctcatctccctcatggggaatcgtctctctttgtttgccttcaatgctgcaattccccaaggtgctttccttcggttcttctccacaggtgtcactgagtgggtaaaatgagtgcaagtacttagcatagtagctgaccctttgtgaccctttgtgaatgctcaatgctgatggtattagtgtcactgtcaccatgtagtttttagattgctaaaattatgattttacaagcttttctccccctttgaagaacaggccctgtgttctgttcatcaatgcacccttagtatccaaagacattatgtctgaggaggaagagagcaccacagggttctagaaaggcatataatcatcttacatccaaatgtatttaatgaaagatgtatttaaaaggaccccaaacaagccttgttccctgacttgcaacatgcagtgaagttctggttgaaggtatggagggactcatttctacctccctctcccacttgccagatcatgggatctaagacccttacagctcagagtcactggtggctcgggatagcacagagaacagcactgttccacggaaacagaatgcaactgcctatggaacctcaatttcctcactgccacgtgaaacgtcaaaagaaacaagtgaaatcaattttaatcacatagttacaactcagtaacatttatgatgtatttaacaacatattcaaaacataactatttcaatgttaaacctatataaaaatgaatgtgatcattttacaggttttctcacattatatctttgagatacggtatctatcttacacttatagcacacatcagtttccactagccacatttcaagtgccaaacaaccacatagggccagtggctacagtactggacagcacacggctagaggctgcagcatggcagtctctgggagaacgaagatatatggtaggggacatagtgataaagcaagaaggtgatttgtttaaatgcaaatctacaatcactcctcttctctgaaaaaataaagtctaggccgggtgcgggtggctcacgcctgtaatcccagcactctgggaggccgaagagggtggatcgcaaggtcaggagttcgagaccagcctggccaacatggtgaaaccctgtctctactaaaaataaaaaaaatcccggcgtggtggcaggcgcctataatcccagctactcgggaggctgaggcaggagaatcatttgaacccaggaggcagaggttgcagtgagctgagattgtgccactgcactgcagcctgggccacaagagcaagactctgtctcaaaaacaaaagaaaaaaaaagaaaaaaataaatagataaaaaataaagtctagtgacttcctgttgctacaaaataaagcccaaatccattaaaatggctcacaaggtatgatgttttggccctttcttacttatggcgcctaatgttgaagaatctggctggtgtgtatcatccaacaagacttccgtgggtgggtggtaggcagaggacagataataccagaattgcaagaggaaggtgacagcaaagggctaattctccccactcatggtggccaccaacaatctggtaaagtccagaactgggaagaaccactctgtgctcaaccctttgatacagtttggctctgtgtccctacccaaatctcatgtcgaattgtaattcccagtgttggaagtggggtctggtgggaagggattggatcatgggggtggtttcaatgtttaagcaccatccctcgagtgctgtcccgtgacagtgttctcatgagatccgggtgtttgaaagtgtgtagcacctctcccttcacactctttctctttcttgctctggccatgtgaacatgtgtcttcttccccttcacctcctgccatgattctaagtttcctgaggcctccccagccatgcttcccatacagcctttggaaccgtgaaccacttaaacctcttttctttataaattacccagtctcaggtagtttattacagcaatgtgagaacagactaatacaccctgggacaaacaacaggctaagacagaaagtaaagctacccaggcattagtaggatctctaagtgaaacgggaaaagaggggtgttcctggggtcaagaagagtaatttttggtatggccaccatacaaatgtgaaaacatctggttattcatacgtgaaactaagggaagaaaaacttagatgcaaactatgacacatgtatcaaaatagtcgattcaccagaaaaggacaatttggtcaatgtcataaactaaattttaattctagcctttaaaaaaagtttatttgacactcagaatacatagtctgtatgcatatatcaaaaaaatggtatcaaaaacatataagtatgcacagagttctgatttataaaatttataacttatctacacaattgtactacaagaactcttcagcagaatgtaaatattatttctaacattgacactttataaaagtcacacccaggcaaaagctgatttattatcaatccatacttagtaaatcagcacacagaatgttcttgtaaaaatacatataatggaccatacgtggtagctcacggctataatcccagcactttgggaggctgacatgggtggatcacaatgtcagtagttcaagaccagcctggccaatatggtgaaaccctgtctctactaaaaatacaaaaaaatttagctgggcgtggtggcgggtgcctatagtcccatctactcaggaggctgaggcaggagaatcatttatacccgggaggtggaggttgcagtaagctgagattgcaccactgcactccatcctgggcgacagagcaagatgtcatctcaaaaaaaaacaaaacaaaacaaaaaatacatataatgaacttaagtattagtgatttccactattcatcatttcacatcatggttcatactcctttcaagataaaaattacttaatatgtaatatattgtgataatgtagatgctttttgcttctcaaaacaccaattagtaattagagcttgtcctttcttaaacagagcgctatcaaaacaaattaaaccttttaataataataattttagtatttacaatttaaaataaaaggatctcaatagaatagtaatattaattaaacaacaaacattcattatccaagtaggctaaagaaaaatttctagtacaaaaaggattacaacaaaagaaaatgttgccaggctatctgctgtttataatgagtgtcgagaattctgctttgccaacaagcataagactaattacttctaatgttcttaagatgcagtcacatgcagagataactatctaagaagtgtgagataaaatgcctggaactccagctattttaaattgaataagaaaggagcaccctgtatagtaacagcaaaaagactacaaagaattaaacaaaaatgaagatctccacgaaatgacaaaggatgatttccaggatacaaagttaagttaaaaaaaaaaaaaaaaaaaaaagcaaagtgcagaacagtgaactttgtactttttttgtacaagaaggaaaaatatgtattttcttttgccaaaaaaataaatcaggaacaatgaaaatgtttatcaatagagaatgagtgaaaagtgagctttctgagtatatttcatagaactaacatgatagtcaaaaagtaaaattaataagggaggaaaaaaccaaactataatagaatacaaacagatacaaatgaactaaaatatgtatcaagctggtaacagaaaaaaattaatgctagcacttttaaccaaaagaccttgactgtagagccgtggtgagatatatactgaagatgaaaggagtgtggagggctgagcatggtggctcatacccgtaatctcagcactttgggaggtccagccagaggatcgcttgagcccaggagtttcagacagcctggccaacacaaggagaccccatctctactaaaaattaaaaaaaatcagtcaggcctggtggcatgtgcctatagtccagctacttgggaggctgaggtgggaggattgcttgagcccagtaggtcaaggctacagtaagccataatcttgccactgcactccaacctgggtgacagagtgaggaaaaaaaaaagtgctgtgacatcttaaactactgtttagtgatggtcataatacgacatcataattttaaaaacatttatatgtatatcatagggtaatgcaaataaatatattaatggtatggtgaatcattaggaaccaagatttttactgtagggttaaaatactgatgcaaaatacaagaagttaaattttttgaaaacaaatgcatgtgatccaacgtgaattgctagccaccggacaggacttacttcttggcaatactgcaggatgccttccttggtatcaatgcaggttttggtccctgatggatctgaatcccacttcccattctggacattcatgtgcatgttcagtctgccacagaacatggcaatctggggttcagccagcaggccagcattaccatcagtgggtacctgaaagaagaagcttcagttagttatagtatccatagctccaaggcagaggcttggaggaagaacagggataactatcaaaaagagttctattcttgctcattctcaattaggaatcagcccggtcttcaacactcctttagattaagtgttatgtatgctacagatgttcttagccacctataaggcaatgctttcttttatactaaaacagagaaggaaattaccaataccgaaaggaatttattcatgaaaaatttacacgttttcccatatgagattttgtggtacctgctgaaaggttctgacaacaaaattacacgttttcctataataaatataatcactgtggaggctaccgcattcttataataaactccactgactcacacagagcatgatgcctgccaggccctgcctgatgaccaagactgaaaataatatttgtgccacctctcagcactgagagcaagtatggcgttggtagttagcaagtgactgtattatgattttgaacagaaaaattcactgtagaattcaccatccacaaatataactgagtatgttggcgatccctcctggtttcccccagaatattctctggttatcagtctcaactcttaacaagtctgttaagagtgctggtgtctcctctcccaaccatctgcaaggagccaacattttctcatttggagctctacatagtgcctgctgggtagtaagtaaggggtcctagctattaccattgcaggcaatagaccacttcacaaaataacttcatgaaaaagggtgccttctgtattttcaaactcttctgtgtacaggcattacctttacaaaaatatttttaaaagagaaaatggaagtcctgaaatatctataccgtgtcacttaacaggttctggtatctcaaaaagaaaaaaaaattcagcaagaaatgaaaaatatatccacaggagtaaaggtgttattaaaccaatcaattagaaggcatattaatcatgataggccctcccttgtcaaatccagctgctggggaaatgtgagacacccatgccaagaagaattaacttccagcagaagccattcgttcacacactcaagaactgggtgattccacgataacttgtatcattcctaaaaactgtccacaggaggaaaaacaccaactaaaattgcactgagaaattttcagttaaagaaatgaaacagtttccaaacatttcttcccacataaatgtaaaataagatacctctggccattttagtcatttttacacatacttcgtcaaaacccaacagaggacttaggtccttacaacaaaaaaacaaaacaggtcttagattgaaccaagtcatgagtgcaaaagctgctggcaaaatctctagagccatgttttcaagtaacttttccaatatttaacgaaattctgcctttacattgccagatggttaagtcaaagcagccgatgccaaaatatccagatcatctgcagaaatagctagaacccctcaactccatctgagccccttgccacttcctgtgacttccatgaaactggggggtctcattctctgacagatgcaaagcagcaggctaagtagaatgctctataaatttaaatttcacagctttcctgagggattaagaggaaattcattgtcttgatcttagaaatcgaaatgcaaatgttgtcaatcttactgaaataagtagtatagataataacactgcaaaaacattaaagaaagtcaaataataatcagatacctgtggataaggccctacatcagatgctatggagggccctgcccgtaaggaatgtacaatccactaatggaatcgccattgttcccacagtactttattctgttcaccttccgaattcattcctgtcccaaagatttccagtcttggcagcatgttgttaactgtacggagacactaatgagcctttaccatagctggtaaatattctgttgaaacagtctcctcctctgcctcaaactctctctgtacttttgtttatccacaatctgttcattacaatgtctaaggaaagcgttctaccttcttgtcaatacaaatgcacttgattccatttcctccccgcaaggagaggaaattgacaatttctctccccagggtagccagcctccaagaaggcccccaatagtccctgcctcctgctattcatggaccctgggaaactccacaatgtatcagggtctgtctgtgcaacaaatggagtacagcagaagtgatgatggtgtaacttccgagcatgtatatattagacttaaagatgctgcaactcttttaaaaacaaaccctttgctaccagaaaggtcactgaagggcatgatgatgtgtaacatccaaaacaaggtcatgaagggcatcacaattcttcattgctctctgggatcactcactgtgagggaggtcatcagctgccatgttctgagacatttggtgctaaaaccaggaaagtttttggcaaaatacactggatcaccctacctgacaaaccaagtaaatgcttcatttttttttcctcttttgacttaacttcctttgatttcttctatttttcactttgtcatcctccctgcttcttgactttacagctattttaatgtcatctgttggcatatgtgtgtatgctgactatcaaaaagtggtaattttttaaacatttttttcaaataaatttattatgaccctataattgtctcatgttcttgccattttttaatgccatctgttggcatatgtgtgtatgttgactaccaaaaagtggtaatttttaaaacatttttttcaaataacttgattacggcgctataactgtctcatgttgtcttcattttaacaatgagagtttagactagaaaatatatgcttcagttcctgtcaggttttccaccagatgagatttaatattaactttaaaaataaatgtttggagaatcgtgatgattaacatgctctattttcttcaagtggagatcatttaataatttaaactgcgaatcctcaataatagggtaagctgttgaattagaaattgtaaaattggttgtgtgtatagatcttcttacatttgacattacaagaggcccttcacaaataaatatcaactcacaaaagccatgtttctcaagtaaaattttttccccccgaaccaacaccagatgtgtatatggaaatcagagcaattagcttggagatacaaattgaaccagaaaccttcctattcttactgaagcccatctgcaaacaattccatgctttcactacatatgcctgtctccctgaattaaaacaagacaaacaactcacggcatcctcacctgcatcaaataacccatttatgaaacaaagcctggttgctaagcgcagccactccctggcattcagccagaaggaaatgtggccacattaaacattgccatccaagggttaactcccttttcctgagtgaagcctccaagaaatgacttaataaatgatacacagggtcctattcaggatctgttaatatggacactcttaaaattgaaatcttttaagattcaatttacctgccaaatacctgaaatctggcaggtatttgctgccagtaaaaaagcacagtcttacaaagtcatcctaaagataattattcctaattttttaaacatttttattttctaaaagaaaagaaatataaataccttagtagatgggaaatataaccacttaactactacattttagttctatttatgtcttaacactattctaaggtgagttaagattactttgcaaaaatctaagacaacatttaaaagatgagaactgtgatataactggccgtttgtggtctatgcttttctaagactgaatatgaaggtaattcttgtaaactgaatgacttgccactgacatcataaaactggagatgctttcccatgggaaaacagtgttcctgacaatgaacaaaataaccagctaaaaacaatgaagcattcataaattgcctcaaaagcaagaggctgtttaccaagtgctctgaactacagagacgtacatatcaaacttaaaaatgctacaagtcttaaaaacagaaagaaaatatttttgttaccagaaaaaaaatatttttgagccacaatataaagaatactgaagtgaaatggactttccaaagcaatttttagaaatggctttaaaagaggcttaaggggataacataaacgaatataaacatatatacctaatctggaccagtctgcagatgtgaatctggaaaccctacgcctacagttgctacaattttcaattaaatgcaaagccaccttcttgaacaagttctcttgttgtcctttcaaacagggtgttccctttctccaaaaagtttctctctgttatcatctaggagatcaaaattccttatagagcaggcttggcagcattcctccccaacagggtctcaactaggagggaaaagtgaacaaggagctctctgttttgctagctgagaggtcctgtttggcaaggagagggcacagatccatagcttagttgcatccgtggatttatgtaattttaaggtttctggctaatgaaagccatctgttttctgcatttgaaccacccgctgactagtctaaatagctggcctcatataatgaagtatttggtactttttaatcagttcaaacttcttcgagtcagattcttgcataatctcagtatttttttttggatacactgtcacactccaccacccagactagagtgcagtggcatgatctcggctcactgcaacctctccgcctcctaggttcaagctattctcctgcctcagcctcccaagtagctgggactacaggcctgtgccaccacgcccagataatttttgtatttttagtagagacagggtttcaccatgttggccaggctggtctcgaactcctggcctcaagtgatcctcctgcctcggcctcccaaaatgttgggattacaggcatgagccactgtgcccagctttgtagcgatactatttctatcacatccatggtttcctgacataaatactggattcccttaacctgggcataattcaactataccccacaagagtgctttacattttcatattaaaacatttaaattctccattgtcaaatgtaaagaactattttctagaatcataatctagaaaatctgagtgaacccctttcaggggaataattcatctgtagggttttcttttaaatgccaaaaaagtatttccagtgtaagcggaacatctgcagttgctcatttcatcactaacagagaactgaaattaaaatcagaatcacaaaagtggaccataagagggaggaaagggcaccaggtaaggatatgtccaaggccatggggttatagggacagagaagggaattcaacctattccgtcaagggttctgttaatgtgaccgggctgtctctcaaattaaaatggaaaattgcaattttccaaggctttgcccctgtgtgtgtgtgtgcatgtatttgtggtgagcaaaaatagagaagctattaaaaaagaaaaataaaatgtgatgactgaaactgcaagtggtttctatttacccttgtggagagttgccacatctattcacagccactatttgctacacaattatttcagagcttgagtttcggcttaaaaaatgatttgccatgaaagcgaataggagaaaaacaattcctttcagaggagtaatctacatatttcactcctggaaacctgaaattctttttgggtcactgttgatctggcttctaattacaagctatcctcccttgatgtttttcacggcctctgttgatattagattggtgcaaaaatcgcaattacttttgtgccaacctaataccaagcttttttactactcaaaggatagatgttctcaagttgacccaaaactcctacccactcataagaaggccagtaagtcatgcttgctgctggtgcccagtaggaaatcaagaggtccctcaataggagtctttgttattcactactcgtgaaattaataaccaacatttgaagcatgcatttaggcaggacccagtaagagtggcatctactgctaggactgatataaatgaatataaaagtggaattacaaaaaatagagccttatgcatggcaaacaaactcttagcctcaaaaacagtttacaatctagtcaatgtccatttagtcttaaaaggtgaatgttttcttttaacttcatatatatacatacacacacactaacatatatgaaaccatacacatactatatagtatgtgatgaaatgagcgagatgtaaaaagttcatctctttcattctgtctttacagtttttctgtgtgtcttttgttttgtttcgttttctgagacagagtcttgctcagtcgcccaggctggagtgcagcggggtgatctcggctcaccgcaacctctgcctcctgggttcaagcgattcttgtgctttaacctcctgagtagctgggactacaggcgtgcaccactacgcctggctaatttttgtattttttagtagagacgggtttttgccatgttgccactcctgacctcaagtgatctgcccgcctcggcctcccaaagtgctgggattatacgcatgagccacaacgcctggcctgtctttaaagttttactgacatgtctcatacagtcaccaaagggaaaaaaaaatgaaaaaaaaatatatatatagtatttgagatctttatcctattctgactctctcaatattgccatatctcatcagccttgaccttgtgaacatgcagatagaaaaagggttagaggcaaaaatcaaagacctactaaggcctttgctcattatctcatttgactcagaaaaaccaagataagtcacttccacatctatttagataatcagaagggctcaaaacccgcctagagtctactcaagagtgttattccaaagcacatgcttgctttttgacagaacaagccagctggcattcctggtactagatgtcaagcttttttaattcttcaatcttgaatattattttcaagtaatttttcccccatggcagtactattttgcatgtctttgttactggcttttaaaaaaattacttttagagcaagtaaaacgggaagcaaacccacagcttaaatgtctaatttgcatttctcaaatttaaatcactagatgttaatatctactaacctctggtagtttcctctttaagaaatctctcctgaaatgcaaacacaaatttctccaaagttagttctttccttaaatctaatgcagccaactgaatctgcaaagtagaagtccaaatctcccaatgttccaactactaatgtttatcaacccttactttatttaatgtgtattttctagtttttcaacagttgacatatacctacctatgtacatatacacatgtatatatacctgctatacagctacttgtatggtatgtagtgggagtgctagaatgaacacacacacacacacacacatatacacacagtttaagagctcaatttgcacaaatctcaaatgctggtactttgctaagatctcattctagaattagtgcatttaagtccatgttgctaacaaggtggaggacttggtaactgggctcctcagagagagtggtttgaatggcattcactgaaataaatttgatagtaacaaataaatgattttccagtatggcttctacttgttctgacagctaggacagattagcacccagcacagaatacaacaaagaaaaatcaaaatctattattcctcttcatttttggtacaagagatattctacatatattcaatttctaaatttctactgttttatatcaaatgtagccaagctaagccgggatcagctgacccttgagcttgtgggctataataaatggttattgttctaagccactaaattttggagtgagtttgtggctttgcagcatttttgtggcaaaagaaattaacacagtcatgtatttgataggaataactaaaatactaagtgatagaatcaaggcatagattgtttcagaaggtagaaactttctcaagttgcctttttttaggcagctgggagtacaggcccataccaccatacctggctaatttttctgtagagacaaggtctcagtatgttgccgaggctggtctcaacttcctggcctcaagtgttcctcctgccttggtctcctaaagtgctgggattacagaactggtcaccatgcctggccataaatattttatatttaatgtattatgtaaggtaggatcagttatggcttatgatctatacactttgggttgtcctagaattggaaagaatctgagcagaggcaaatagaatgatactgtaaacacatgtactgaagcttttaaggagatggtaatcaatctttgcaatctttagatctgattgattttgtgagcttcttttctcctacattttttagacctctgcaaatgataaacaatttgtacaaaggcatagtttttaaaaaaaattaaacatattttgtttacacaatatatttctaaaaggaaatatttcaaatctgaaagcaatctaatgctattaaatagaccccgttcctgctcatacctcacatgtggctatgtgaatacaaaaatcttataattatacttctcccagcaaaggacatgcaaatttcatcaccaaacattcatgctactgcaatcacactccatcaagccatatgtgttgaaatctgtgtaacaaaagcagtgagggctcttgccacacgtaggctcccgcccagccctctccgggaggtaggtatgtatgcagagaagagagtgggctgagaaatggaattctggcatgttgggtcaagcagactgatcatgtgacactcgcactgagatcctaccaaatttcaccatgtggcagagtcagcaccaaacaaatcccaaagttaaagcctcagttatcacctgggttttgctgcatagacctagccaaatatgtgtaagagttatgagctctagacataatttattttattgccctgaaatagagtatccccacataatttgcaagtttaattgcaattatattcctgggggtcactcctcatacctgcacagttaggatattgccaggttattcatggtacctcacacaacacctggcagttatacacagatcctcatcttttttttttggagacggagtctcactctgtcgcccaggctggagtgcagtagcgtgatctcagctcactgcaacctccacttccctggttcaagcgattctcctgcctcagcctcctgagtagctgggattacaggcgcgcgtcaccacacccggctaatttttgtatttttagtagagatggggtttcatcatgttggtcaggctgatctcgaactcctgacctcgtgagccaccgcgcctggccttacagatcctcatcttttatgcaatatcatattcatcactaaataacgacacagcataaaaatgaacttttactttatcagtggtactttacagcactacagtgagttttctagagtttaaggcttacgctaatatgcttaatgcacaagtaagtgcaaacttaacaggtttctttctggttcttttatttttcccctctatttcttctcattgacccactgcaatgttgacccactcggaacgtagagcatgggcaaaaaaaagaaccaagagaccattagagaagagaataagtctttgaaaagctgcaggtgggaatataatggaaaacaagattccagaagaggtagtgggtctaccatttaactagaacatgcccagtagagccatactgataaatctgcatcttagagttgctgatatacttggacaaggggaaaaagaagcatattcctctatcctttgtcagcccagaaatttatcccaaccctattttcctatacagtttctaccagctttcaggcgtcaggccattgtaaaaccaacataggtggagagggcaattcaggctaggatggggagaggtagttagcgggatttccagttctgggctatagtgagggagtcagtatacactgctgagtctggtacatacattccacattgtccataccctttaatatctttacaatttctaataccaaagtggtatgaaaatactaatgaagttaaagacccttaccaaaatgctaattttccaggttaagttatcatattgtcttcaatgtgcattaaaatctcagagcagctatcgggggataaggagagtgagtacccactaagcttggaggccagctaaactctctagaaagtcatttccatctgacttcccaccagcatgaggcagagcagttcagagcatttttcaagtgagtcggcctgccgttaccaatgccaaatttaaagcacttatatgttttatcacaagcccatgagcttgtgatttcataaaatggtactaactggtccttgccatgagtaaattcaagtaacacgtatgaagaagattttaataaaattttttattagaagattttaataaaatttttttattaaaagattttaataaaattttttattttattaaaagatttcttaaaggtcattaacgcaagtcatattagaagagatcacaggcaagtagacaaaaagaatttactccgtgaaagctcactgaaacaggaattcggatatttgacatttacttttgttcttgtctctcatatgtacacatcaaagcacacacattcacatggatgtaaagatagtaagaggccacctgcaatcagaacaagtgagattataaataagtatattatataagaatccaagacaagaattccttacttttaaggaaagggcatcagagatttatgatcttagacctttacctttctatttttagcagatttacagaaatattgcaggaacagaacatgaagtcacttatttttgataagcacaaaggatatttacattatatcgtctggtttatttcctttcaaagtgtcataacatttactcatcagcctttactgtgtgcttataactctcatactgttgtggttttattactaggatttttggtctaggagaaagctgctttacaaacataatagaaattcagtgagaatattaacttgacataaaaacccaagataattttcaaacagcattcttgttcattgttcaaattgtattctgttaacttatttagtttaagccaagattacttcttttcctgcagacttggaacactaaagaatactccaggtttaaattccaggttatttgcttgataagcctgggtagattgtccttcttaaataacttacaccaaagcactatcaaagaagctctccctttgtagagccctcagattcacagaaggaatttttcgaattgccatttctataggaataaaggctatcaggaaccacaatactaggagaaaataattctgaaggggaggtagcagtgaagactcttatttctattttcttgactatatttataaaaaattgttgccgaaagaacagaagaccaagagccaaaaatcacactgcagtcttactcttggatgtaatgttactatcagtttcagtgacacaacatcagaggcaatctgatattgacaatggtaaaaatatgcagacgccaatattaggagggtgcagttagttgacagtagagcctataagtattcatctaagttttctctgtttgaagagaagaaaagagaacatcaaacatttctagtatatagagcaaggattcctaatctttttttttttttaatgtgcaaacaagacaaaagttacttcactgtctaggggttattccctactctttagcactggcctgactctctcactcccacatataagcattcaataaatacttatgccaacaattaagaaacacctggcatgaaaaataataacagtaataaactagaaggtagaaaatgtaattattgacaaaggtgtggaacaatacaaaataaattccactttagatacctgtgaaattttttattgtggcaccaggagagtaatttcctaacagagaaaagaaaacatagcatccacacctctgtctttaccaattcctaaataccagctacagttcaacttgtccacggacttcaggctcctcctagaaaacaagaaggcttaaaaagcaagacaacctattagctatgttgctcaataaatttcaatgttaatttcctaattctttgataacacattcctgaactcctttgtaattcaggcaacattttaaaaatcagatgatctaactggactccaagaattacataaacagtgtgagcagtgagacttcgaatgtgcaatcaactatttttttaatcctgctgctaaaagccttcagtagcacagaactggttgtcagagatttcagtgtaacctaacacctaacgtgaatgactgctgtacaaaaatacagctgaaaatactatgaggaagagatagaaacggattgttgatggctaagcaaaacagcaaatgctgatggttatcaaacacatgccgttcccactctacacagataagatttcaaagctgtttgagtcctaggttaagttttgggcaagttctggcttgatgccttatattcagataaacattttccaggcagtgaacatattcaaagttggggacagtggggtaacccgaaaacattcctgaccttgatggacagataatccaatggtggagacacaaataaggccaaattggctaaccaaaggtgctggagtgttaatgcagaggtctggcaagggtacaccgaagagctctcaggaaagagtgactggtttgacttggagaaggagaaggaaggcagaccaaagatcagagcagaaaacatgcccaggctgagtatgggtcggacaggaagcatgaaaggtagcacaaggctagcgtccaaatgaccttgaatttgtaataaacgtgtgaagtcactgggagctgctgccacattccaaagcaagcaagagcagcatcccaccagtgtatgaggaggatgcgggggccccaggacaactttcgtgggcctctttctctcttaaaaaaacattaaaagctatattttagggctctgttgattggtataaagacaactctaagtcaggctggattcattattgtatattcatgattattatcttgttctttatttttccttctgattttaaaagaaattaaacatttttgagggctcctaaaggtactgcacagccaagactacggtctgactggaagcaccaggagtaacaggaggcagtaaacaggagtggaggtagggaagattctaaggcttgtaaatttcaaggatgagcacattcggtgcggtgtttagggggtgagtctagagtgctttcatggccaaggtcaacaggcattattagagtgcaccaggctacagaatgtgagtttgtcctgacgggggtgggggagaaaaagaaggaaaacaatcactacctccctgatttattagcaaacatcccattctgtctagccccacatcacatcaggagttctaagagtcaatctggcagagcaattcatctacgtttcattgccttgagtgatgggaacttattttaattttcaaaactagcatatgtttaacagacttgtgcagagctgcctatgtgacctggggaaaaaattatctggactctcaccatgcagattatcagcttgaattgctaatgcattccttacccccgacggatgtctttttgacatgtctacagaggaataagccctaaaacacagaaataacaaactgtacaatctatatctcgcccttgggcaggaggggtattgcactgtgtgggaaagatttacattctaccaaaaaatctaagcaaagagtatttacataagcacaaaaattttttcacaaacttgttcaaataaactaagagaagaacacaactgtgatcgcaaaacagataacatcacatagattctggcttctgactttactgctgttgttcatagcatgtaattctagataataagaattttaggtaattagaatagaagtgcctcttcagatgtgctaaaatgttacgtgcatggctgtttctaaagagggaataatgttggtgtacacctaacgctaaccaactgtgccctaatgaaggtaaatccccaaatatccataacactcactttgttttctgtgtacggccaatctccagtcaagagctcctttaccctgacactagtctcacccatgttgttcagctatgcagtggttctccaacagggtaagcttgttaactacatgggtcctaggccactttgctttttgagccctatgaactgtttctaggtagaggttcaaagttcttggcaaagatgattgtcacgacttgggtggtgctactggcatctatctagtaggtagaagctagggatgttactaaacatcctacaatgtacaggcagcctccgctgtaggccctcccccacccaacataaacaattatttggctcaaaatgtcagtaattcccaggttgaaaactccaacctaagcctttacttagggggaaagagtcatgtcttactgttctctgtatttctatttgttcacagaacaaaattagcattcaaatattggttgaaccaaacagagtttccactcaaaacataattaatccaactgacatcatataaaacaataactatgtaaactgtaaatcctacaaaatacagcctcccttccacagaagcaaaaaaaaaaaacgttaatttttaaaaggtagttggtgtatcaaaagttattaacattaagcaagataaccccttcaactcaagattacagaagattgccccataattatttcatataaaatgatcaaaaataattttattgtattaactccctgtgggtcaatttataatagtaatcttttaattaagaaatcttgagggttaattatccagctttcatttaaaaaaaaaaaatgaggtggtaactatttctgggcaaagttcaccaggaagcaagacaatgcactcataactagggttccaagaccaagcaagccagtcagaatctctctgtaggtaaagactttcaaattctagccaatcatttcataatgaacaacttagacaaacggagaaaaggcttaaaaactggaatctctttgaataatgtattaactctactggaataacaaatatatactaataggttacataaatcaaaagccctatgaaaatatataactaaaaaaattattgctagaaacctctctatgtcttgtatctgcaactatgaacagggtctaatccatcactgtctatatctctagagacctcaggggacttacagctgggtcagggtcactgtaggaactggctgaagggacccacacatgaaagtaccaatatgatctttggaatcaaaaggcaaaagtcaattctgtatttagtaattaccagctgtttggagaaagccagttaactttacctcttgatttcctttatctctcaaatggacatagtaacatcccacctcacaggatattatgaggattaaaatgcagtaatatacataaaatggagagtaagcactttaagagctaatcatattgtctcaacttgtatctagcaggaagagggaaaagaaaagaaaactaaaatgagcacgttcgtaagacatctggggagcctgaactgatgaatacacagcatttgaaatctcctgcgagctatccctacaaagatacctgctatttattcaggaaccctgagagaggatttcctgcactaaagaaaatgctgactatataaccacatatgacacactggtttaaagaatgtcttatgccatttaaaatagacaatctttccttgtttatctgcaagacgtctgcctgccaagttgtctctaaaagagacaaactggtaacgacactgcaacacgtgtgtcgtcaaccccagctacacgctcagtgtggcagatctgactcaccaagtctacatagtatttttaaactatctaagatattttaactcatgcagtttaatggcaattttagctcttttcagaatgtctgatataaggttcatgaagtccactctgacaatttactatccgtgaatcacaatgattctaaacagagctaagaagcaaatttcaagatattaaatttttttggttcatttctttagccacagtattaaatttgtttctacacagaacttctcttgtgtaagaaatttgttattgcatgcttataccactaagttattaaatatatcactagtaatgtatactcaaaatggcccagtgaggtttaagacattcgtttcgaagtatgaataaatgcctcatttcatatctaattcagtgttctcaaaaacagttttcagaaaatgtcaacagttattacctgggagtggggagaattctgtcataaaacacatatgggaaatggatcattcaagatggatactggaggcttttgaaaaaaaaaaccgtaataatgaagtcagtttaacttttttaaaaccaaggtttcccaaaatgtatttgaccgtgggccacttccattgtgacacatttaacatgcttggaactgaatttgaaaaatgtactaagagatttgaaatggatgatcaagcaaaacttaaccagatcattctgagtgaaacaaaataaacaaaaccaaaagaagccttaaagggaacaaaagcaggagtgttaccaagctcctgcagaaatgatgattataataacacatcagatttggctctaggcaaaataattacatgacatgaagaattgagagcaagaaaagagaggattagaatgaaggagtgtttccaaaggcctaaaatatttcagaagcaaatcatgagcattcagaaaatgccaaaagggtacaagtcaagaattttataaggtcccaatgcagtgtaaaattccaggtcttggacaggcaccatggctcacgcctgtaatcccagcactttgggaagccgaggcaggtggatcatgaggttaggagttcaagaccagcctggccaagatggtgaaaccccgtctctactaaaaatacaaaaattagccatgcgtggtggcagctgcctgtaatcccagctactcaggaggctgaagcagagaattgcttgaacccgggaggcagaggttgcagtgagctgagatcacaccatgtattccagcctgggtgacagagtgagactccgtttcaaaaaaaaaaaaaaatttcaggtcttaggtcttttaaactatacaggtgaactaaatcatggtggtttgttccaaactaagttaaattttcacttagcgatataaacgtgagatggctaatgacaagcagatgcacaaattttatcacatccctggattcctaaattgcatttgtgaaattcaataaagtgacacgaagtatagacaataagtgaataagaactaagaacagaaaaagtagaagacatggatatctgcagcaaagcccacacccgaggggagaaaaacattagtgctgttgtttccatgatacgagcacaggttcctacactgatttcacaataaaaaatacaaattacttctaattttcccattttcacacaagtgaaagagagttcagcccaatttctgaattaaattttccttcctatagagggaaggtctttagaaaatctttacaaaatagtactacacatgccttgtgatattagggtgatacggtgataaattaaaagcaacaggtaattaatatgattaatgtaatacccagagaacttcactatttcttaaatgttttcctgagatgttatattgaaacgttgtgctaaatgtcattacataaaatgttgagcatcacacaacagctgacaaactaaccttccaaaaagaaaggaatagatggtcattcacacgaaggttacattttacaaacaaaactggacacacaataccattctgtgatgtttaagatacaacaaaacatgtactgcttttttaaaaattgctgtaatgaggctctcacagttattcacgttttatttagctacaagttttaagatatctgtgaaagaaaacttctttgttttaagttcttgtttgaagatcaccaagcttctatagtgtctctctgaagtggtgacacgctgacttccaggcacaagccaggcacaagagaagctctgcaggaaacagcaaggccactctccataaggagacaggcttggccatgacaactgtggcttagagctgaggagcacagcaactcacaactaatgtctttgaattttaggtaccagcactgagaatcaagttcctttccatgttttaagaaactaataaaatcctcaagaagacctgttttagatattcatgacatttcctaaggcattctataatgttaaaatacttagaaatgactcaaccatttggctaagcttacgctaagggcaaattcctgtttctagatgcgtcaggtctggacagcaccaatatgtgagcttcaacacccagagacttgacttctatttagcaatttatatttttagtagtagccttcccttccttccttccttactatcacagaaaagaacaaagaaaaaaaaattctgcttcaaaagccaaagagttcactactaagaataaattctattatcttccttagactatgcctattactgggtaatataaatatatgttgttggtcagatgcagtggctcccgcctgtaatcccagcactttgggaggccgaggcaggtggatcacgtgaggtcgggagttcgagaccagcctgaccaacatggagaaaccccttctctactaaaaatataaaattagctgggcgtggtggcactcacccgtaatcccagctactcaggaggctgaggcaggagaatcgcttgaacccaggaggcggaggttgcggtgagccaagatcgcaccactgcactccggcccaggtaacaagagcgaaacgccacctcaaaaaataaataaataaataaataaattaattaattaatttaaaaaaaaaggtctgttgtcaatgaagtagtgaaaaggcccgtaaaacaaaacacttcattatttaccaaaggagcaccgaggttttccagcgaaatgcaaccattttattgttcacagtgattctataaacgtttttcctttaagacaattgcgcatagagcaatacactcagtcagtcactcatatatttgttggctctttttactaagccaaaacaaagattattaaactcttattagagacaacaacagtgtaatggaggcatgcttaaataagggaaataagaaaatttatactatactgagtataatttaagcattgatagccaaatgaccaatacggcaatacttgagaaatgtccagtcataagaagctcctctgaacgataaagccaaacttactgacaactgacttgaactaatacctaattcaagtcatctgagagatctaaccaactgttctcatcagtgagaaacattatatgttatctattgcacaatatgactgaaagatagtcatgtcttgaatctcaaatcttcagaatgataaaccacaaaactctactttgacacctaatgtatacagatgaatgtctgtctacttcctactggaatcgtgatagttgaattaagatttttttttttttcactcagatcctgttttcttaaataaggaaaaacaataataaacttaccatattaaacaactaaaaatcagttgtccatagatgacaaatgtgatacaatctagctgtcactagataaaaggttaattttgtaaacagagtcagttaaaaaaataaacaaaaaaataagcaatttaagataaaagtactttggcatggtgagacattacactcactggggccaggagttcaaggctgtagtttgctatgatcgagcctgtgaatagctactgcactccagcctcacatagggagaccctatctctttaaaaaagaaaaaagtgatgtctcaaatatggtgtttgggactcactaaaaataactaaatttaagggggaaagattaaattggtattatatatgccatatgcttaaattctgattttagctcaaccttataattaaatctgtactttgcacccattagacatttcagcaaactgaagttcattcaaatcaaaatctacaaaaagaacaagatcccaaggcactgaattagacttttaatattcaagatgtaaaataggcactcttttaagaaattacttttagttctcctctacctttaaaaaaaagtttctctcctactcgtgaactaattcagaactttacatttctgttacacagcatatgatttctgctttattacttggatatctgtttagtattcacaacatatatgtatctccattaagcccagaattctttgacagatggtctcacccaaagaactcataaatacttgattacttcaacttagtttgcaaaaattaaaaaatcagtaaattatgttacagactatagtattttgagtgttaaaatcacttctaaagaacaccatcacaacagaaccctaaattcagaatcgggttgacatggtctaagaaagtgaataaacgggtaagtgatcttcctagtgcatcatattctacactaaaaattcaccatttatacttcatttctgaaactcaatgtcaaagagaagattaaaaatctgggggctgggcacagtggctcatgcctgtaatcacagcacttagggaggcatgggtgggtagatccctgagctcaggagttggagaccagcctgggcaacatggcaaaaccccgtctctaaaaaaagatacaaaaattagctgggcatggtggtgcatgcctgtagtcccagctacttaggaggctgtggagggaggatcgcttgagcccagcaggtcaaggctgcagtcagccaagattgtgccactgcactccagcagagtaaaaccctgccccatctctcaaagacaaaacaaaacaaaacatctgacagttcctgagtaatcggcagcctacgtaaggaacctattaatactgcatatgcaatttttattaacacacttgccaatatcctcattttaggactagtctaatgtttgtatgatgccagactaattttgaatgtctgaattattcacaattactaggaagacaaatcattagactatggattcagtctacaatcttattctatatcttttggctatgttaactgattaacaactagaataggccgggcgcggtggctcatgcctgtaatcccagcactttgggaggccgaggcgggtgggatcatgaggtcaggagttgaagaccagcctggccaagatggtgaaacctcatctctactaaaaatacaaaaactacagcacgcttgtaatcccagctactcgggaggctgaggcaggagaatcgcttgaacctgaggggcagaggttgcagtgagccgagatcgcaccactgcactccagcctgggcgacagagcgagactctgtctcagaaacaaaacaaaacaaataactggaataaagaaaacagttccctgtccgtatcaaaccaatcagaaccaatataagaaaatgctcttccaccaaaatacagatttgatatggttgaccagataatacatttctcttcctggccctaatctagaacttaacttggttgtgactttgatttctgacatttacaaaatggcattcagtcctttataacccattgacttcgcttatgttgaaattcctttgcaggagtttccaaacatgttaaagtacagcatttggaggagaagcaatgtttgcctcctggactcaagcgatcttcccactcagcctcctgagtagctggaaccacaggtgcacaccaccactcccagctatatttgtagagatgaggtctccctatgttgcccaggctcatgacaaggaatactgcatgccaataatggatgccagctgagtgtcctctaattcaactggattctgacactgtacttggagattacacatcccacaggctgagggctcagtaccacaaaactcccccaacttcagatgtcaatcacaagccccaggttgtagcctgtgcttctgaccaactggctaccattccccagaccccttacttcgttttgattcattgctggagcaccttcagagaactaagagaaatacttgcttacattcacccatttattttaaaggatattacaaaggacacacagatgaacagccagatggaagagatgcacggggtgaggtgcggctgaagagaaaacgagattccatgccctttcctgacatccaaccctccaggaacctccatgtgttcagctatctggaagttcccagaacgcggtccttcagggttgttaagaaagcttcattatgtaggtatcattgatcattagtttatcaactcaaacttcagctcctggaggttggggagggtgactgaaagtcctaaccctctaatcacatggtaggttacccagccaccagtcatctcattagcatataagaccttcttagcactggagattccaaggattttaggagctaaatgtcaggaaacatatacatcaggaagaccaaatagatgccacagtatcacatgaccattttcttggagtcaagatatttgttcttccttaaaacttcgatgtttctaaatatccaaggtatccacataaggttaaaaataaacttctcaccactccacttgtcatttaaaatcatccaacattttaacatttcatcaaatctctatatctatacaatagtgcccatctcttcatgtttttaagagccctgtcctcacactattcttagtgaatagacagcaagagatattattcccttcttacaattatgctctgtgcataataagatagcaagccaaagataaagccaggattagaagtactttcttaaattgagagcttatcagaaggtaaagctggctaacatgattatctatgtaacagcaccagaccttctcacttcgaaattcaagacatctccaaccactcagaaagggtatgggggttgaaaacagccacattatatgcacgacttctataacttaaagatagccaagttcatatcaaactaagttattgaattttatatcactttctaacaagtaatcatagaaccatgacaaaacatacaaaatacagaagttttctccttgacttggtgcaaattcaatccaattactccacagacctcttttattttagtcactcaaactttgatttttcatttccttagtcgtacattaggacaaatgcaaattatatacagaaggcagcacatttagccttattatctcaaactcattcctaagcaagtacatctgcctggatggtgaggcctccatcagaggttaaatgcaagccctagctggaaagttactggaagggcatgtgtcctacctgcctttctctctcatcatcccagatctttatctccccaatgtcaccacattaggagtgttttgcatataaatcaaaacgaagccccagagagcccttggtaggaatatctggacttgtgttttagaaatagttttgtcagccaggcacggtggctcacacctgtaatcccagcacgctgggtggccgaggcaggcggatcacgaggtcagaagttcgagaccagcctgaacaacacagtgaaaccctgcctctactaaaaatacaaaaattagccaggcatcgtggtgcacacctgtaatccagctactcaggaggctgaggcaggagaatcgcttgaacccaggaggcagaggttgcagtaagccaagatcacaccattgcactccagcctgggcaacagagtgagactctgtctcaaaaaagaaaaaagaaaagaaaagaaaagaaaagaaagaaaagaaagaaagaaagaaagaaagaaagaaagaaaagaaaagaaagaaaagaaatagttttgtcacatacacatctgtgatcctctcactctgcacgccactgcctctctgaaagaaccaacataccacacaggcacgcacacgatggacaatatacagccaccgagcaatcatatacatcttttaaaaagaaacaggcaatttcatgattctactgtaccctggatccatcaggctttatctagggagtgctatttttaaaatatgtacaggcttttttaggtcctcagtaagatcatggaagtgttttgctccctaaggaaaactgaaatttgaggtataagactggagttttacacctctagaattcatctttggtaaccatgcccatttgatttataaataatctaaaaatatggatttttaaggagcagtgtatttaccttagtccacctcatctttttcttttcaggaatgttatcacaaaaatgtgtgctgattacttccttgtatctgagctttgagcaacttacaaggcagacactggacctaaaacacaggttggttgttttagaagaagaaaaaaaaaaagctggttttaaatctggatttaagtcttggccctgactccaaagcaggccagtttatgtgcctgtcttctgttgccagatctgtagaaactagaatgtcattctccgctgagaaaccacaaactagtttccttagaccattcgtcttcctttttgagacagtctcaatgtcacccaggctggagtgcagtggcgcgatctctgctcactgcacctatgcctcctgggttcaagagatccatctctgctcactgcacctatgcctcctgggttcaagagatcctcccgcctccacctccgcctcctgagtagctgggactacaggcatgcgccaccacacccagctaatttttcctattttcagtagagacagcatttggccatgttgcccaggctaacatcaagtgatccgcccacctcggcctcccaaagtgctggggttacaggcatgagccactgcgcctggccctccttaaaccattagttttcaaaccgtatttgaagttcctcagaggtgcgccagtatttgagagaaggttaaggtttcaatgagagcaaatgagattttaaaatcttttctataaacgggggttctatcccatctaaattttgcttttttatgaaaagggttactgccctttttttaaacctaagtaaaaacccataccctttactttgttacaggtgtgttataatttcaagttgtcttttaagtatgagataactttcattgttacaaaacaagtgggttgggagtggatcaacgagacggaggtttgctccttcatttaacaaagaaacaagaccagagagctctttcctcactgggagttagaaatgaccacagacgctaagaacagaaagcaagacaccaaaactaagaaaggttttaggagctacaatctctcatttagaaactccagatagaattttaaagaaaaaagtaaaaacaatatatttctacaattcaaataatataagtcagagtaaaaaacaaacaaacaaacctacttagcacaacataaaaatattctggttactcatcctagagatttaaaaaaaaatcaggaggtgaggcaggtcctatttttgttccttcatttagtggatctgagtcatggctgttccaatgattttcctgatgaaacaaaatacatgtttgttccatcaacaaagggctaccctaggaaactcatcttctactgcagtaagaagggtatcataggtattttttgtggttctaatgggtactcagaaaatccttatgtgatttaatatactcttaaaaggaccgtctgaaaccaaaacatgtactaatatccagtggcctttctctctgtatactggtttaataataacattctgcatcaaatcctttcagaaacctatgaacagaagtaaaatgatatgatacctgagaattattttaaaatgcttcagaaaagaaaatggggcagggggaggtgctgaaacaagaacagcaaaatgtggtcaatttttgaagctggatgatgtatatgtctgaaatttaacataataagttttaaaatcttcttagagagttggcagatcatatactatacacaaatattgtacatgttataggatcaaaatatgggattaaactaagggactgaaactacttatagaatgtcattctcaagccaggcacagtggctgatgcctataatcccagcactttgggagatttcttgagcccaggagttcaacactagcctggccaacacagcgaaactctgtctctacaaaaaaaaaaaaaaaaattagccaggcatggtgttcctctcctgtagtcctagctacttaggaggctgaggcgggaggatcgcttgagacaaggaggttaaggctacagtaagccatgatgactccatggcactccatcctgggtgacagagagatagcctgtctcagaaaacaaaacaaaacaaaacaaaacaaaacaaaacaaaatcctcctgcaaatattctgttggtggatagttttcaatgtatacaatacagtcagtacctgttactcaatatttatccattgcaaacacaacacagaaacctaaggaactcaaaaagcaaactgacatttgtcaggaactgctcccttgttggtcaaagaagaggaaaaggagggctttcttcgatattattgtctactttcttggtaagcaataaagtgtttgcagttttatgtagactggcggggtggggcggggaattgtgacacggttacactttcgtatatatcaagttactcccatacatgattttaggtagagtctgtattttaatgtggtagaaaggggtgattagtatcttgaactgcagaggctacaaaaaacaatgatgcaacattacgtaagggatgagaaataagtaaataagtaaaaaaaaataagtaaattgaaaagtttgttaatgcacaaaaccaagtaactggagagaaaaggacagaagagtcaaagaatcaaggtccccagacctagagtgagaatgtacattatcgtgtgcataccttaatctcaaatataagctcattatcaaataattgtgcaaaaaaatcatctgttaccttgtgaaggatagaaagggttatttcttccaaagctcaaaatgtggtccacagataaggtaaggttacattagtggttctccaattttaacttgcaccagactctactcaaggttttgttaaatagatctctgggcccactcccagaaaacggtttgagaactatgtgtttatactatggctaattcttgcaaatcatctgattttgaaaccagtcacaattttttgaaacattctatgagaaacatcttattaataagaattttcaacagggctcagtggctcacgcctgtatcccagcactttaggaggccgaggcaggcagatcacgaggtcaagagatcaagaccatcctggccaacatgatgaaacctcgtctctattaaaaatacagaaattagctggacgtggtggcacacacctgtagtcccagctactcaggaggctgagggaggagaattgcttgaaggatgcagtgagccaatatcgggccactgcactccagcctggcaacagagcgagactccgtctcaaaacaaacaaacaaacaaacaaacaaacaaacaaacaaacaattttctggcaaagtaagagtattttacaaagagaacaatcacactggtagagaactgcactgcatggatggccaaattaaatcattacaccaaataatttgcaaacttcatccctactttggtcacaataagtaacattgtacttttgaaagatattactgtctgagaacagagtttcatcttacccaaatacagactaaaaacaatgccaacttcacagtactcacttacatagttgataaacagaaccaacaagtcctctaattggtccatttgaatctggggaagagctggctccaatcattgtcaattacatcagcaactgtggaatactccctgagatcaacaaactgttaactgcagtgaccacaacttgacccaggccagagcttccatcctcgggagggtgagtcaacagcatgtcaacactaacccaacttctaccacgcacagcaaggctgtgctatttaggcgtggatcacacgcacactgcgccaacttctaagctaacaatggacaaccaaagcctccggaactctgtcttgggtagagtaaatcaatttccttttgtaggattttcttggcacaaagccaagtgtcaggggctgtggagaaggaactgctggcccaaattccatccaaggttgaccagtggtttaatcccttctctaaatcaggcctctggcaaaacagctagaatcaggaagccaattcatatttaacaaattcaaagtctatcacaacacaggaacttgttaggcaagaagataactgaatgaacacctttaaaaattctgcttttttaacaaaagctgtctacattattttctcatgggagttttggtactagtgttaattcatagactctcccttaaactcaaataaattatctattgaaagaatggcaagaagtactgccaaacttcatagggtggttgggctaaatgttctcaagttcttttccaacgttaaaacaaccggattataagaaacaattcatttaatggagcattctggaggagtaaagacagaggatttggaatgagactgcataggtttaaattctaacactaactgtaattctggccaaaaggttatgatgtggggtcctcatctgtaaaatggagtatctatctcatggagtcagtgtgagaattaaataagcacataaatttctcaacatgacgcctggcacctagtcaacactcaaaatagaggaaggctaataatgatgacatgcaaatctgatattgcaaataccaacgcaaagagtctaatgaaaactttctaaattatatgtcattggttcattatttaagcttctgaggtttgtacaagcacagattaactcaaatgttacttaacgttttacatttactataaacaccctgatgatgtattttacagtttcttgatttttccctacagtttgggcacagtcttattatgacagaaaagaaagcaacaaacccaaaggaaaggcttttccctagactgcttttaattttctattaactgcccaattttgaaaaatagatctacaaaactgggttctggatgactgagttcttttactttggggacaagagctgatgctaaaggagaagacagaggattaagaaatttacattctgtcatttacaaacatgggtatgaacatgaacagagcctctgaaaacatctggcaaatagaagacactatgagccaatcaatcaccaatgctggcttagtagtcatattaataaatacttgctgagtatatactatgttctctgggctgtattatttcttttacgcctcacaacaaccctaagtttggtacttttctatcggttccagtttacaaatgaagaaacagggaagagtaaggggagttttcaaaaagaaataatatcaacagttattacatcaagggtttcacaaatgaagcattcaaaaattcagaaaggcaatgaattgctttgctagacctgtggaaggccctcaacctgcacaggtagccaacacccggtacatacccaattacatccagttaggtcacctctgtatggctgcaaggagccagggccatgtgtggtgcctagccacactatatacataacctgggaaccatgcagcaagatggaagaataggaaacagtatccagaatccagatgttagatctcaggggtagggtatgcacaaggagtatttgcaccatttaaggtgataacgctgctgtctcatggcaacatgcggggcagtataagaggcttggtaaatatccactggaccttccctaagcttagcacaatgcgtcctggatggagaaaatatcaaagccaccaatctgagcatgttgtggaaccagagagacttaagaggctgcaccaccacacagccctcactcgatctttctaggctctgctaagaatgttgctgctggctcactgcagaaactaacacttactcaaagatggtgcatcctgtgcttattttcaccaagcctcatatccccttctctgccagaccattttaataccattagatacttccctattcaaaattaagacagtgtcactggggccaggcacggtggttgatgtctataattccagcactttgggagatagaggtcggaggctcgcctgaggccaggagttcaagaccagtctgggcaacacagcaagaccccatctctacaaaaaatctttaaaactgctgggcctggtggtgcaaacctgtagtcccagctactcaggaggctgaggtggcagcatcgcttgagcccaggaagccgaggctgcagtgagctaagaccacaccactgcactctagccttggcagcagactgagatcctgtctcaaaaaaaaagtaaagaaaaagtgaaaaaaaacaaaaatagtgtcactcagcatcacttaagaaaattaataaaaataggtactacctgtatttcagagataagtaaaacttatgttgaaatggtcaatgctagatttttataaaaagatgtccaatttttaaaaactcattcaagttataagaaattttataatctttattccatgtcaaagataggcattagaaaaattcagtattactttactttccataattgtcaacttttataaacaatgtggtggagtgggaattaaaatctgataatagttttgatccataaaatgagtgggaaaatcaattttaaggcagaaaaaaatgcttcaagttaaacacttactattaaatatttaaacaaaaaaatgtaataaagataccttcaaaactggctgggtgtgatggctcatgcctataatcctaatatgtcgggaggccaaggcaggaggatcacttagcctaggagtttgagaccagcctaagtaacatagcaagacccagtcttaaaaaataataatgatgatgaagttttgataatcaaaagttattatcccttttggctttaccatagagctacagataggtgtcctggttaggtcacttcttttattcttccctagctttactgaagtataattgacaaaaattatgtatattcaatgtatacaacgtgatgttttgatatatgtatacactgtgaaatgattatcacaatcaagctaattaacatatccatcacctcagagttactttttttgttctgtgtggtaagaatatttaacatttactctcgcagacgttttcaagtgtacaattcactattattaactagtcactaggctgtacattaggtattaatctcataactgcaagtttgcaccctttgaccaacatcgcctcacttcccccacatccaaaccctggtaacaccacccttctactcttgtttccatgagtttgagtgttttaggttccacatataaatgaaatcatgcagtatttgtttttctgtgtctggcttatttcacttagcttaaggccataagtaccaggggcctggatttcaacctcacccctattgtttattgctacttgggtcaaattatgtagcctccctgtattaatctgatctcacgctgctaatgaagacatatccaagactcagtaatttataaaagaaacaggttgaactgactcacagttcagcatggctggggaggcctcaggaaccttacaattagggtagacggggaggcaaacacgtccttcttcacatggtggcaggaagaagaagtgccaagcaaaaggggggaaaagtcccttataaagtgatcagttctcgtgagaactaactcactattaccagaacaggatgggggaaaccgcctctatgattcagttatctccacctggtccctcccactacacatggggattatggggactacaattcaagatgagatccaggtggggatggagccaaaccacatcactcactgaacctcattttgtttatacttcattttgagatagtatttgctctgcctttctgataaagctatgcagaataccaagttagtacctggtttcatatatggtttataatacattattcctgatacaatctcaatttactgtttttatacagcctattactgcacaaacattttatatcttaagcaatgtggattttattataatctcctacactaaatagttataaaaacattagctattggtttgggaaaggctacactcaatcttaaatttaaaagtcagttacaattttccattaaaaaaatacaaaataagctacagatgtcttatcatggtcaattctcttgaacaactttctgggttaaaatgcagaaaatataacagatctcagtatacaattcagtgggagaaagaacagttccactaaactgctttcttctgacttaccatgagaattccaaagatagcattaatgtcaacttgaaaaatgatattacaagcaccaatgctagaaattttagatcgagggagttgctccttgatgttcaatgtgctgaacaaagtaaagcaaatgggcctgaagtaataatttatgcttccagtactttcaaaagcaagttttgatataagaatcagttacccatgaaaatagatgaaattcactgaaatgacctagttttataatacaataaaacgttcttttcaactttataaaagtaatgttcctctgaagaacagctgggaggattctagatatcacatcaaaatacgtgccttcctaacattagagatgttttacgtggaatgggatggcttgcctgtgggatgaagtctctggggagaactatcaaaagctggctgactacctaccaggaatggcagaaccaaggagtcctacattcaagatgtgccaagagggagcagcctctaaggcagtgatctctaacctttttggcaccagggactggttttgtggaagaccatttatccatggggtgttgggggtgggatggcatgagactggatgggatgggatggttttgggatgaaactcttccacctcagatcatcagacattagttagattctcacaaggactggaccaggcaacctggatccctcccatgtttagttcacaataggttttgtgctcctgtgagaatctactgccaggaagcagcactcaggcagtaatgctcactggctcacctgcctgccactcacctcctgctgtgtggcccggttcctagcaggccatggaccagtacctgtccatggctgggtgttggggacccctgctctaaagtatctgcgtacagttaaaaagactcaaatagtacaaaaggtgataatatacaaagtaaatatgtactaccttctcctccattccaatgttctcattgcccagagtcagattttgtcagattcacttgaatctgctactgacataatacacatataaattttctgttttttatataaattactgtttaatctgtgattatgcctgcattctgaatgttttcacttatatcggtatgattttagatatttctatacatcagtatggttatgcccacttttaatgtatcagcataatattctactgtataagagttttttaaaggcttgcttagttgatacaaataatgctctcataatatcctcatctgtgcgcatttatacaatatactatgaactaattagtttctagaattcctagatcaagggatatgtacataaaattctaaatgactgatctaaaaaatttctgtaccagctgcatgcagcggctcatgcctgcagtgggcagatcacttgaggtcaggaattcgagaccagcctggccaacatggtgaaaccctgcttctactaaaaatacaaaaaatgagccaggcgtggtggctcacacctgtaatcccaggtactcgggaggctgaggcaggagaatcacttgaacctgggaggcagaggttgcagtgagtccagactgtgccactgtactccaagcaaagaaatatctgttatcaattgacagtagatgaaaatgccaatctggcaagcctttttagtctttgcccatcagggttttaaaaaacaatgttatatcactgttttactttgcatttccctgacgactatgagattgagcatatcttcataggtttattggctgtgtattttttcctgtgtactataaaattctttgccttttttgtccacgtctaatagagattctgttagacatccacactgaaatatttatacataaaattatagaattgaaattatttcaaaataacccagtgagggaaaagagaattgagcaggttgagaaaggggaatacagataaaacaagactgggtgagagctgatcattgctgagcattcagcgcactattctctcttgtgtatgtttaattcttttcataataagttttcaaaaatgttcatttttctctgaagatgttcatatttagtatttcttactgatttgtaagaacacttcatggaataaaaaagtttgccttttgttgctgacaaactgtactgggtacataatactaggtaatccagtattggtactgggtaaataattacccaccttccttctatgtacagtcagataacccaacaccattaactaaataatccatctttcccctttctgatgtaaaaagacacttttatcttgcactaatttccaatatatgcacaactttatttctagacttccagtttgccccattgacctatctatgcatgggatgtgcagttttaatttctatatctttacattttgcttctggttttttattggctattcttacctaatggtttttcccagatgacttttataataattgtattaattttcctaagtatctactacacttataaacacccctccctgcagaactccttcccaaagacagagagcctgcttttctctttcacactggtatgtttttatgtttccacctagggtctcatctgttgcatgcaagctcagaattcacttgacatgctgatagcatataatgttaaagaattcttctctcagtgtaaaaaatatttagctactgtggaaggtcaaactgctaaaaccgactggtgtaacatttgaatgctgccctttatataagctttatttttataaataagcatctgactagaaagtcagtaaaagagcatgatataatcagtctgaagcccagtgttttaaatataatacactaattttagacccaagtattttagttttgctttattgtctacagtttcttaagaagatgtaacttaaaagaaaaaaaaaatcttttaaatggctcaatcaatttattagaaataagcggcaaagagcatctgttcccacagagcaactgttaagttaatccccattaagtcggcctcaaagcacttggatgcagctacaggatgtgggtgtgataggatcacacaggcgaacacctgatagggccttacacacaccgggctaatcagaacatcaaaaaaaaaacctgaagtctcttggaaggactgaaaaatccaatccctccccaacccccccaaaaaaacctcccaaaacagactattccattcaattcagattttgtgaattaatgaaatttaagagccacctgaaaccaccaaagatacacagtgattttctcccgaatctaaggtccaaatgacacaggtagaaaaatgcactgataaaatgttaacaaaaatgcatgtctaatacttagagctacgtgtgagcaggttttaggagaaggatattgattctccctgaggcatgagcattacccaccatttcaggaagcctctgcaagtggagaagccacaaaccccttcaaaaagatctctcaattacccacttcccagtcccctctgatatgtggtaaacaattatttcaatgaggttggcagagatttttcaaagctagcaggcaggcattttgcagctacctccagctggtccaagcagccaaggctgtcaccagtgcctggtcaccgctgaaaacacaaggaggggcaggactagggcaggagagtagatggagagagctgtgtcccgaaccaacattcttgagattcctttgctagtgttttttcttcagggttcactgagaagaggaaggtcagatggggagggacaaaacccaaggaaatgaggctcatttcaaactctaacaacttgatcacaaacaaaatgtatgtagaattacaaataagttattctgttttcaggcatcaaaaatgttatcaatgaaatgttgagatgctaaagcagtgaaatgtgaaacgaagcagtgtcacaggcaactgggcctctcccctggcccatcccaggagggatgaagggtggctgatatgaactctaaggattattctgaaggggccaacaaatgttacaaagaggctcaaaaataaaaatcagaaccatttttccctcattcatccagggcctactcctggccatgttctgtgctttgcactttattcaatttaattcaatttttctcctaagcaatctatttagatactttgtagatgtggaaattggtttagggaagcttacatcattttcttgcagtcatatttctagtaaattgaaagagttgtgactcagatccaaggtctgaatgactccaacatccacactcagaacttccttcacttgggattgagaaaaagggaaataatggaattgggagggggagagaagacaccaagtagagatatcagcattcagaacttcctgcaggagagggtgaaagaagctggcagccaggaactgagggccttactgattactttagtatcttaccaatcaattgcattccaaggcttgcttacttaggaggctgactgcttagtccaagaagaaacactggctgaactctttgacttattttgctggaggcagagaagataagtggttaagagtaaagacaatgaaaacatagtttaaacccagtccactggccagctccctcccagctggggataacagtaggtacctcacaggctgctgaaaagaaaaaattaagtgaaagcacttttcaacaaggcctggttcatagaatgagctacatacagtacctggtaattagtattactattgccacaaccaaggaggcctctcagcaaactatttttacatatgccagaaatacagttattttttccagactaataaatcacaaacaatatggcacggttgaccgccaggttactgatgcaatttcttttcactggaaccaaaaaacaaaaccaccaccaaatctgaactaagtataatacaataattctccctgtcttaaattttaaaatacagaagaaaagatgaattgctgtatactctaaacgctcttttaaatgtttggagtacagaatgtctttcatgaaatcatcttgattaaaatgtacattcttttccaagaagggagtaaactgagtatggaagaccctcaccattagtttttataaatgattgatcaatgggaatcgtcactgaaaaattgcatacaatttttggaatgaatgcaaattgatggaatgtttgtaagctcatgtgcttcttccaacaccccagcatgctcccacctcacagcctttacactgtattgttctctccaggtttaatacttgtagaaaaggggaaaaaaaccttttttctctaccctgttaggttcagcacatgaggccttgccaattaaactgacgagacagattcgcaggggaaaaaacacaaattttatttaatgttattatttttacatgagggaggggagaggagggagctccacagaaaagcaaaaacccaaaagaagcagttaggcctgagagcatacacaccattttaacaaagagcaataaactgtggagaagtcacaagacaaaggagaggggattagggcttccaggggaagtgtggtaaggtaaatatatgggggaaactaatagaagataagggttatttcaataaggtttgtttctgcaggcgatggtgccacctctagtggtctctccagggatggagaggggaaggaggataccttcacacagcaaaatttttataaaaagggggtaaagcttgtcctgggtctgctatttctcgattgtcttcagctcaaattagtactttgctgaaatggcatatttgggggtagcatattctgatccccttcatacccttccagactgtgtctctatccagctcctcactggcttaatttttcttcatagcactgaccaccaagtggcacagagtatactgattgacatctagatagacagatagatagacagatagatagacagacagacagacagattgactgatttgctctctgccccacccaacaaagtacaagctctgtgagatcaggaagctggcctctttcatggttgtatcccaatgcttggcatagtgttggtgttcaattaatgcaccaaataaatgaacggatttccatattatatcaatattttcttacaattagaatttctgtgatgttgatagtgtaagaatttgtttttattagttttcaacagtatcaacatttactcattatgtagttacagtattgtatttttttaaagtaaacaataaacaacactgtctttgctccaaatacctataatgtgaaatatataaaactggccgactgaccacagaaacggcagttaataatcaaaattacatgtgtctggctgaatggactccacgaccttacactaggttctgtaacagcagcatttcatcacaatttgttaaatttgaagataaataccgtctcttttctggtcaaagattcttatatctttggaaacttgacagaattaatgtttttgacttgtttttcaccacataacatcaggagagactttaacagcagtgaagtggcaaggaggacgctttatttatatccgtgtaatcatgtaacccacttcatgctcccactgaatggctccagtaaactgaaatcacaatttcactaatatctacattccagctccagctacatttgcctgtcaaatgcaacaacttacagttaagcttctgcctacacgagcaatcacagaaccattaaataagaggattgcttgtttgaactactagatcagcctttccttatttttgctaatctgtgtggtgtacgttcattaccttttttttttatgttaaagaccaccatgcgtaacactacttgacagcagcaatttatagcagtggtccccagcctttctggcaccagggaatggtttgatgaaagacaattttgtggtttggtttcgggatgaaactgctccacctcagatcatcaggcattagattctaataaggagtgtgcaacgcagctctcactttcttacatgcggttcacaatagggtttgcgctcctatgagcatctaatgccctgctgatgtgacaagaggcagggctcaggcagcaacactcactcacccattgctcacctactgctgtgcagcaaagctcctaacacgccacagaccggtaccagtccatggcccaggggttagggactcctgattcacagcattacaataaataataaataattaaaatattacctgatatttggcaaacaatccctctctaagtcactacttccagcctatgttcaggctagaaatgccaaataaaaaagcacatgtctgtctgggcacggtggctcacgcctgtaatcccagcactttgggaggccgaggcggggggatcacgaggtcaggagatcaagaccatcctggccaacatggtgaaaccctatctctactaaaaatacaaaacaaaaacaaaattagccgggcgtggtggcgggcgcccgtagtcccagctactcgggaggctgaggcgggagaatggcgtgaacccgggaggcggagcttgcagtgagccgagatcgcgccactgcactccagtctgggcgacagagcaagactccatctcaaaaaaaaaaaaaaaaaaaaaaatgggccaaggatctgaatagacatttctaaaaagcaaatgtacaaacaaacaaaacaaaacaaaacaaaagcacaagtccacaactacatagctccagtttccctaaacagatttacccattcagtaaacattacatgtacaaagaacttaaaatagtatgagatttaatgttaagaaataaaatgtaggatctaaaacgtaatctatagcataatctcaaaaatggtttagaaatgacataataatacagacatttgtgggtggtaggattatgcatatttttatatatttttaaatatatttttcaaaagcttcctataaagaatgtaattctttcccaattccaaatctagcttaaacataattttacaaaaattattctctcagaatgtaaactagtaccacctctatggaaaacattatggagatttcctaaagagttaaaagtagatctaccatttgatccagcaatcttaatactgggtatctacccggaggaaaagaagtcattgtatgaaaaagacacttgtacacatatgtttacaggaccacaattcacaaatgcaaagatgcagaaccaacctaagtggccactgactaatgagaggataaagaagatgtggcatatatatatcagggactactactcagccattacaaggaacaaaataatgtcttttgcaacaacttggatagagctggaggccattattctaagtaaagtaattcaggaattggaaaaccaaaaaccgtatgttctctcttataagtgggaactaagttaggaataagcaaaggcacacagagggacatattggactttagagactcacgaggaggagggtaataggggactagggattaaaagaaaaactagacattaggtacaaggtaccctacttaagtgcactaaaatctcagaattcaccactacgtaattcaactaagtaacaagaaaccacttgtaccccaaaagctactgaaataaaaattattctctcaaaaattttaagccctaaacttcagttcctattgtttatatttactaagaaaaacaacagaaaacactgttttaaaaatggtggatttttttaaggttaaaggtatataagacagctgcctaaggaaacgcagatacccctgtaccttgttgttgttgttgtttttcacttttttaaaaaacatagagatgggatctccttatgctgcccaggcttgtctcaaactcctgagctcaagcaatcctctgacctcagactctcaaagttttgggactacaggcgacagtcaccatgccagccaatatccttgtacttttaactcattcctacaagccatgaatcctctaagcattgtcccagacacagcactggcaaacttcaatcgttttcatcagaatataaagaaacacagggcatgcttaacttcaaggttgatatttcctttgtgagtaaagccttgccacagatgagaagtcctgaggatcaaacaggaaaactttaagtttaattaaatctaaaatcataaaacctaagttatatgactaagcaaactcttcaaagcactcagtcaacatccatgctggtaaatatttcaggaatgaaatgaaaaataactttcaattctaaaagttcatccatcatgcatgcttcacgttgtaaagcaaatatttcacaaaaatgagtttacaacaaaagaacaccaatcccacttctccaaccctccatgtcaggcagtaagctttccacatttgcttacattctgaaaataactattttacatgccaggaatgcaataggcttaagctgtcaaaaagtatcatactttaagtgtaactgggtaagaactatgggcacacacacaataagccttccaaaacaaggggaggtaaatgaaatcttaatacctgtgtttccagaagcccagaaatgaagtgcaattccttataatctgtacatgtttacatacccatacagacaataaaatgtgtaaggtaatgacaggtccatctctccccttccttttagtgggcatctgacatttcagggttcagaatcacatatcctgggtcccaaaaggtccccccattcctattccaacagtgctcacaatagaaaaagatgaactgatcactggaccctacatcatctcatatatgtataatactagtccacagagaggttgaagatatgcctggtaactctattcatcctaccccacaagttttgtccaaatcaggccatgccttcaagtgggccagattgtcttaaagctcctggcttaatatttaactgatagcaacaacctaacgttagtaccttagtaactaaaggggatgcagcaacatgaagcagaaaaagtgatgaagaaagagattagaagttagagaacagggactgggctcttgatccttaaaatgtgggtgattttgaacaactcaacatctccagatattactttcttcatctgtaaagtggagaagcttaaaaaggaggtcttatagattctacctgttccagaaactatgattctcttcctagacagctgcaggttgaagagactctcctagagctgcactgtccaatacagtaaccactagccatctgtggctactaagtacttgacatgcagctggtctgaattaaaatatgtgaaatatgtaatcaggtgcggtggctcacaactgtaatcccggcactttgggaggccaaagcggcaagtcacttgaggtcaggagttcaagaccagcctggccaacatggtgaaatctcatccctaccaaaaataaaaaaattagctgggtgtgatggcacacgcctgtaatcccagctactcaggaggctgaggcaggaaaactgcttgaacccaggaggtggaggttgcaatgagccaagattgcaatgagcaagctagattgcactctagcctgggcaaccgactgagtgagactccgtctcaaaaaaatagtaataataaaataaaaaataaatatgtgaaatgtgaacattttgaagacataatatgaaaaaataatgtatttcataaatagcttttatattgaccccctgttgaaataacattttgaatttagtgacagactaaaattaatttcgcctgcttatttttttatgtggctacttgaaaactttaaattagatctaacggtcctattatacctctactggataattctgctttaaagtcagtcctgggcatgcatgacgcccagaggaattcacagataaaatgagcccaggaatctgtatggaatacagacctgtaggttaccatttccatattaaatgtgtaaagggctgttttaaaaccatgcttttgttttcttattttgtgcaccaacaataaatcaacagcaaatatcattgggtctaaaaataattgatatctggctgggcgcggtggctcatgcctgtaatcccagcactttgggaggccgagacgggtggatcatgaggtcaggagatcaagaccatcctggctaacatggtgaaaccctgtctctaccaaaaatacaaaaaaacgtagctgggagtggtggcggaagcctgtagtcccagctactcgggaggctgagggaggagaatggcgtgaacccaggagggaggcagagcttgcagtgagccgagaccgtgccactgcactccagcctggacaacagagcgagacttcgtctcaaaaaaaaaaaaaaaaaaaaagataccacttcatttatgctatgcctgaatcctaattatcaactgtaggccttaacaataatcctaagtggatgtgcctttatgcaggcacttgtggcctttttgttttctttgaattaaatatacaaagtaataatttatcttacttcataaaaagattataatctcccattttttaaaacacatttgatattagtaggaataactaaaatgaactcgtatgaatagaccatttttatttcattgatatctaactaggaacgttgcaactaatttttgcaatctgtatcaatttgtttaatatattttaaatgaacaaagaagcagagatagtttctagagagcttatttacttaaaaatacaacagatattaatcaataaaatattaataagattcaggtgagtcgagagtgagtactcaagttctcttttctcacaacgtattcttggagtgccaaccttttcagttcaatgattttatgcaaaggtatacatctaactgcctgcaaaataaactactgactattttaaatcagataaagcaaacaacagcccccagctctgcaatccaaagccagcaaaggtcacccatttcagactgggtttgaagcatagccagttatgatagctcaaatattttcagatgtatgaaagcagaacagaattcagaaatatacattctttggcagacaatttttttagaaccaagtttctcaaattatataatacaaactatatgactattagaaaattatgcatgaattaaaggagatttatttaattttcaaattctaatataattaaaattttcaaacttaactatatgggcttcacgggtgaaaaaaagtataatttaaaaatatgagcaatataatatgacagaaatatacattcaaacactctttctaatttttcataaattaacaactatttgagacatgcacaaattttcatgtgtttttctgaaggtggtatccagaagtgataattttcctgacagtttaacattttttaaagacatgccaagatttaaataatgtagctttttgattactctttttttttgagacagagtctggctctgttgcccaggctggaatgcagtggtatgatctcggctcactgcaacctccgcctcctgggttcaagggattctcctgtctcagcctcccgagtaactgagactacaggcatgcaccaccacgctcggctgatttttgtattttttgtagagacggggtttcaccatgttggccaggctggccttgaactcctgacctcaagtgatccacccacctcagtctcccgaagtgctgggattacaggtgtgagccaccgtgcccggcctttttgattactcttaaaactgcgggatcaaaatgaaatgttagaaagtaaaaccaacagcagaaagtaaaaccaagagcagcttctgaggaatcatattttagacatttctttcagacagattctgtaatgtgtcaaactattggaacatatttcaactaaatatttaagtgaagacaaaatccctactacaaaacctccaaatactctaacaatgatgattctatcaggcctactcagaactacaggttttccccacatcttgatttcaaagcatactttctgtgacgtatcttcatttaatcacttttagaataattgaacaagaaaataggtaaggaattaaaataaattttaaaatggcagtcccattcttactgacataaatttattaagatcaatgttcctttttgcatagatcttcccattctgtttcaataacaccagcaagcataaacagatttgaaaagctacgcagccacagaaaacaggttcagcatgacagacagatctagctcaaaagaggtgctcagtgtcaagctcttttctaaaaacctcaaagcttgttttgtctgctgttgctttcaaagaacaagcacaacaaaattgttttgaggaagtctctagatcaaacgaaagacagttaaccaacagggagagtaaactgactgccactgctgtccacacagggccacagaaatcattgctttgttccatcactctagctggaaggccttcccaggaatgcaagtctgaaccatctagagttctctcagccagaatgaaggctcagctcttggatgtttctaccataaaaatgagaaagcatttcctacctcctcctctgtcactccacaaagatgtgcttcctgtgtggctggctagcagataagagaaggtaagcaaatcccaaaagcctactctaatcgctcacggagaatcttagctttggttcagaacgttaagtctacccattttcctctatccctttatggtactgtatttcttctacatcccagaatgccagttgccactcaatatcctacctctcctttacccttaagaagagagccggaaatgtaatttctgatagcaatgctcccagctaatagagcacatttacatgctcccttgcatcgaggtgtcactatctggcccatgagattaagcagaccttgaaaaggacttctacaaaagctcctaaacctaactgaaccatgaatatcaatgcctcgtccccattttaggaacatttaaaagtactccatttctaagaaaatgaagttcaaactcattaagggcatccaaaatttataatttcacactgtctccttcacttattatacccctgggcttccccctttgaaactctacaccctcgctgttttttctgtctgggaagccctccccaccccagttcaccttcacacatccttgaaacctagttcaaattctgcctgccttctctgggaagagtttgtacctcctctattatagcctttggcacactgtacctaattatttctccgtctctttcttcctccactggactgcggaattcctcaaggcacagactgagttacctttctatttactcacagccccacccagattctagatctcctgtcataactgaaacacagaatccatgcagtatgtccataaaatgaataataatttcacaaattcaaaatgagagaaacaataagatagtaaattttttttttttttgagacggagtctcgctctgttgcctaggctggagtgcagtggcacgatggctcactgcaagctctgcctcccaggttcacaccattctcctgcctcagcctcccgagtagctgggactacaggtgcctgtcaccacgcccggttaatttgttgtatttttagtggagacagggtttcaccatgttagccaggatggactggatctcctgacctcgtgatccacccgccttggcctcccaaagtgctgggattacaggtgtaagccaccgcaccaggccataaattagtaattttttaaacatctaactccaaataaatgtcaacatcacagaagtcaatcacaaatgccctgagaaaacttgcagtagagacataaaaggggaatgcacaatccaaatattcagctaaacattctgcattaaaccttccccctcatctgcacacagaagaatcacgggcttaggcttggctttgtgttcaacctctgatagaaatgagcaaacgagcaatgaagtcaacatgtcagattgctttgtaaatctaaataacttcgcatgtgataataaattctaagaatgcatccaatgtctttttctctgcaacaacaagacactaatatttttttctcatctcatcggctatttattaaatcaataaatacaattaaaaacacatgcgcataagaaatactctcaataaactgaagggatgcttcccatctgtgtccctacaatatgacccagaaaattcacaatgatataaatttaacctttgagtctagctcacaaaagtgaagtgaaatatccaaatagcaaatacgaagaaaggaactaccaagaaacaaggaaagtcagcctccaattttgttcatttaagtataccctctctgccaccacaacattcattatgtttgtcctggacagctctaatggccatgctgattgatactcagtgttaaggccacctctgtccaacagacagaggtggcttctactctgtttcagccaaatactcacatggctactctatcatcacctggaaatctcccagcttccctcaggaattcccccctctcctatttcactgaacaagcaggaataagtgattccaaaattgcaattttgtctcaaatgtactcttaaaagtgaaaccctccacaattcaactagcagcagttctgtaagctgcctttacattcaaacaccctatgggttagccaagaacgcccctccacaacaaccatagaatttttatattcgttttacttctgttgcatttaaattttctggattctgtggtataagaggatttaacacttgacacaaaacattcaaaataagattgagaaaatactagcaagatacaaggctaatcataatgacctcaattagattttcaattcctgtcaagttaatggtatatagtagtattggcttcaagctcttcaaattgaaaaatacaattcttttagataacagaggtaatagaattcaatatatttttttaaagggccaattttgatccttgtcacactaaacactagctgtaaaatggccaaaaaaggagccaaaaaaaaagacaatgacagagaaattttcattttcatgccactaaatttaattccaatacacattttctttccaaactctactaacttcttcacacaaaattatgtctaggcaccctctattgaaagtgtcccaatcaatcagggcatggatgaaatatttcaaaaatgaggcattttttctttttgcaggccaactgaatttttgaaatacaattgcaaatgactgaacgtgatgtattgacagtatttatgaaaccttttcacaataaaatgttccaaaaagaggctgaaaaaaaagaatcttatttaaaaggctttaatcttctttctatgcttgttcgcagtttcttaaatgttgagaaggttgcacagctgttcgaatcttcaatctgaacgtaattctttatcaccacaacatagaatttctagagaactcatttatttagtacatacaaaatgtaaggcattatcatgagtgatcaaacaaattactgtatagaaaagtgtgtgatcacaatcaacactaacttctctctcccaccacttgttttcaacatttaatcacccaaagtagatcttctgtctacaattattcttttacaatgtagtaaatatatagttccttcccccagttatctaagtttaccttcacatactgaaatgatcagagaactttgacaatactacagaaactattgcattcacaacacacatccttctacgtagcattctcttatattccttacccaacttaattttttccaagtcacttccttcctcctttttattctgtctaccctcttgggggcaaggacctcgaaaatatttgtgaaatgaaggagtggccctttcttggttgtacccctaagaatctaggtttctttgtgtatgaaaataagctaatttccacagaaatttggctttaattttaaattgctaatcaatttaatatgtaagtatctatgattaattattcttagaataattagtctgcatattttcacatttctatgggagtttcttaggtactcttcagttatatcctcaaactaatttactgtaatgacaaaattatatttgtgttaaaccataataagcaattgagagcatcaggatggagaatatttgctactacatatcacttttcatatgatgggttttaatgttagtctctgaagacttaagctaagacttcaaaaactttgcatcggttttaaaggcttaatctttgaagtagatgaggattttttttttgaaagataaaaaaatcaataaatacagttaagaaacagtgcttatccatctttattctatgagcctatcaattcaattataaacaaaataactgagtaatgatatttataaaaacaacattggccaggcacaatagctcacacctgtaatctagcactttggaaggtcgaggcaggaggatcgcttgagcccaggagttcaagatcagcctgggcaacatagtggggaccccatctctacaaaacatttaagaaattagtcagatgtggtggcacatgcctgtagtcccagctactctggaggctggggcaggaagatggcttcagcccaggaggccacggctacagatcacaccactgcacttcagcctgggtgacagagtgaggacttgtcccgaaaacaaacaaaaccaaacacagtatcaatatgcttttgaaaattcatccaatagtaggagtagatataacaagtccttttttaagatgaataaacctttaatggataaagccattttctttactttctcttaaaaataaaatttatgttgcctcactaattttactgtgaaataacgagcacacagacaaggaaaaactaaacaaatgagtttgtagtaacttgggatgaggggcaggtctaaaacacgttaagtctatctcaacagtaggattaaacctctcatttttcttcctgtaaaatatctccagggggtcaaaatatattagttattcaatgtttgaaatttagcaaagcagcaagagtaataatgcatttcttcacttaacacaaatgacttttctttatgcaacagatctcttattctcataagtatcttttatggctgaaaagtaatttatcagtctgtatcatctaggatgccttacatttttcaatgaagacagtatgtggctttctggaagctaatgaaagccaaattattaaataagagacaaattattagattctctcaaaaaaagcatcaggcaaaaaaaaaaattcctatcaaaatcaccaaaaaattggccaggtgcagtggctcacacctgttatcccagcactttgggaggcctaggtgggtggatcacttgaagtcaggagttcgagaccaccctggccaatgtagtgaaaccctgtctctactaaaaaaaaaaaaaacaaaaacaaaaattagccaggcgtggtggcacatgcctgtaaacccagctattcaggaggctgaggcatgagaattgcttgaacccgggaggcagaggttgcagtaagccaagacacgccactgcactccagcctgggtgacacagtaaaactcagtctcaaaaaaaaaaaaaaaaaaaaaaaaaaaaatcaccaaaaaacaaaagaagtgacaattattcttgttgaatcaaatttctcataagaaaaccttctgactttgtgaagaaaaaaaggaaccatctggaaattaagagattcaaacactgtttggggtccatcattaataagaccttaaggaatcactgcacttcattcatcaggatccattaatttacaaaacaggcttattcatcttttcccttttccaaaatgtttgtcctatttattcctcatccctgctcatgaaccctccactcctgcttctggaaccatcttaatcactcctcactgtatctactgtaatcaggatgtttatcacaaatatggcttctgtcattacacatcctcgtatgtgaacccacttcttgtcttcttgtctttagttggacaggacaattataattacatgagctggttaacaaaaacccatgtgaattctttgggactctgcttcttgatttttccctgcgttcatcatcatttaaccacagtatcaccagtttcatacactcaaggctttcaaatatccttggcctgcttttgaagctaaaaaccttttatttttgagcaacatatgctgatttttaaaaaaaatatataatttcaattaaacagcagatcactataaagttttaaagatgtaacagccataacatggctggttacacaaattcactttactgcagctgggcgcggtggctcacgcctgtaatcgcagcactttgggaggccgaggcaggcggatcacgaggtcaagagtttgagaccagcctgaccaacatagtgaaaccccgtctctactaaaaatataaaaattagctgggcatagtggcacacgcctgtaatcccagctactcgggaggctgaggcaggagaatcgcttgaacctgagaggcggagattgcagtgagctgagatcgcaccactgcattccagcttgggcgacagggcgagactccgtctcaaaaacaaaacaaaacaaaaaattcattttattttgaaactgatttcctagagaaatgccgcattctcaagcaatctgctttttggtttccctgtccttgggtgaacataacttcaagcttccatattaggaccaaaattcttttgctggcatttgaaatcttccatttctacccagattggcaaagcctgtttattcgttttgctagcaaagattctactgaaaactaaaccaagtctgttcacagttccttgcacatagctgatagccaactaatagttaataatcaagccagtgtataaacttgctcaatattagacatctgtggcaagctgccagtgtgtacaacattaaaaaataggtctctgggaggccgaggtgggcagatcacttgaggtcaggagtttgagaccagcctggccaacatggtgaaaccccatctctacttaaaaaatacaaaaattagctgggcatggtggcgagtgcccatagtcccagctactcaggaggctgaggcaggagaatcgcttgaacccaggaggcggaggttgcagtgagccgagatcgcgccactgcactccagcctgggtgacagagggagattctgtctcaaaaaaaaaaaaaaaaggtctacatccatgttatgtggaaaaaaagaaaaaaaaaaactaggtatttcccatttgtgtaaaaaatgcttatgctttttgcacatttctgtactgttttaaatttttcaatgagcatgaattattttcatttttcaaaaaaccaattgaaatacacaatacatatttaataaatgaaattttataacatgtattctaaaaattgtatctgagataccatgtgctttttaaatttagatcaaactcatagacaacaatctgtcaatttcctgcaatagtcttaattggccaataagtaatttgtcaataagtgaaacatcatctagatttttaactttcaactatgcaggaaacttacatatacccattgtacatcaacatcatcaccatacatagcagcaactaacacacagtgcttatgctatgccatcaggttacatatatattaactcacacactgtttcaagcatttaacaaagatattaattcgatcctcaataactagaagtactcatcccattttacaaaggaaaaaactgaggcacagaaacttgcccatggtcactagctcaaaagaaacaaagacagaatttatgcccatgcattcctgccctggtctaaactctcctgattagtgtgcaatgctgccttctctacatacctgagaaacactcaatgactcagtgttattggcctaacatcacgcctggcatcaaattcaacattataaattgagaacaactctggttcgttctacagaggtgacatttttaaaaacctctcatcttccccattttaactatcttctttcgtaagatactgtgagtctcgcaaggttcaagctaaatctctattgcatgtttcttcaacatgtagccacacaaaataaacctaaataaaatgatctcttaggtttctatttcagcagatttaatacatgtgaacctgagacttctgtggccctctctgaatactcagctagctaatctactaagcatccctgtttcataaagctattaattgatgcacatatccaggcttttaaatttaaatatgtgaatttattcctagagcaatcattgtactccagtttttgccagatttctacttctgaagaggtaccactcaagcataataataatctataaccaagattaatctaaagaggaaaatttgccaaacttttttttccaagaaaaatactagtgtcctcacagtaatgattatttcttaagccatccacactaaactgaaaaaatagttacataacatttccccctttactaagcttttcacttgcaaaatcagcttcagggtttgagttctgtctgcttttcttcttatacaacaataaaaaaagaaatacatattttattgattaaacttgctactcattctggggtgtgctcattccttcccctgccaccttctgtcttctgtgtacagatgagggtgttatctgtacactggctgtgagacccacagggtgacagcgtttccaagggtttgcaaaagacggcatttcccatccatccccactccatacatttgcatctgagctctcactatgaaaaggaaaagatttttttatttctgttttcttcagcccttttctgtctacaaagccaatctcctctgttcaactcatcggaacatttatactattttacagaatagtgttgcctgaatgtagaatcacaacaaagccagttgagatctttaaattaaaaaaagaaaaaaaaaagatttcataatcaagcatagtcaagtgaaacagagagaggttgaaaaccaccagacaaaaacaaaacacaaacagaaaatgtgatttttccctatcctcctcgttgccactgttcatctcatactctgcccatcaagatgctactgaagctctctggtcctgcattcagccccttacctttgacctctcaactccttatttcaaattccctactcctgttgagaataccctgcaccagcatctgtcactcaagtgagagagagagagagagagagagagagagagagaaagagagagaaagagacagagggtgtgtgtgtgtgtgtgtgtgtgtgtctgtctgtctgtctggtagaggcagagaggaatgtaaacaaatattgtatatgcagaaacttaacctccaatccccagacctgggatataaacctggctggaaatttactaccaggaaatgctccaggattatctatgatctcatcccattgttccttactttttaaatacaggaagttttctctgtaacatatttactcagtatacctaatctgtattttccttttggtattttagtacattccactttgttttattatcatgtgcatgttttatttaccctgcaaacttcctgggagtaaggggagggaggagggaaggggaggtaatgaggtatgcagtcgaactaaaccttacattctggaagctttaaatttaaaatgcatctgtacaggtttatctttacatttgtaattgatagagattttaaaagaaatgtattaatgaaagatgctttgtaagattctcaaggtaatacaatttgcagaaacaatgtacatttctactgaatttaatgcacttctcactgatagtttagtggccacgtgaaatgcaagtaatagctatgcttatttccagaatgactgacaacattcatacaaatatctgtagaagactctagtatgcaaaaaacagtaacataaaatagagatcctctagcaacaagacttaacataaagacaacctctcccattccttcaaaccaatattgttgatcacgttatttctttttaatttttttgaatcagccattcctcatttaacctcgtgaacttgcatgttccttttcatttcctcagtcaggaccagtattattccatctagtaacttctccgcagtactaatagccttgcaaatgtcgttcaggagcctctgctggttccggtgacaagagaaaagcttctgcagtctgccagttatcatggtttctcatcgattagcaagaaccgtgactccttacagatcaccatcaaacctgagctttactattctgtgtgtcggcttctacctttagcgaggtactagtcagtagcagcaggtttccataaactataaattagcactaccacaaaggtaagatgattgtgactaggttaaaccctcaacagagggaaataaaacttaagaggaagctagatttaaaaataaataaataaataaatattagggtagtgaaacatcatatagattagggtttgttaaactcacacctctatcaacataccagccaaaatcatcaacccagataataaccatgtttcccccgatagccaaggccccattatcattgcccttattcatttcttttctacagccacctgcagcagacctattttctaagctctataaaagacagtcaactcgtaattacatcttttcagtggacacagagagaaccagataaaccaccctcaaacctcagtagactgaattacctacccttctaccaacacttcgcaaaatggcataatgtgaatctcacctccaccctttaaaggagttaacaatagctactgaaaaggtcccaaaagatggcagaaagagcatattaatgcaattaaacagaccaaaaactaaattcgaatctgcctacatgcttcctctttttatacagaaagaaatattgctcaacaaagttacatatttaagttttgacaaaagcttcaaaaatacggttatcatatgcttttaattccttaaatgtatggtttttaatctgtagtaagaccattcgggaaaactggaataattctacaaataaatgtaagtaagtcatgagagaaatcagaattctcttagttaagtgcatttttttaaaacatggaaaacgaaattctttaactcttaaaacaacctgtcttaactagccctaaggtgattcctgagccacttgtgggtaaaaatcagaagagaaaaaagttcaatgaccttgcaaattagaaactaaaaaactaatggtgtgatagtctgtacagcctcagtggaattacaggaaaacatctgcccggaaattgctttttttcttttggaaaattactaggaggctgggggaaaagaggggaaaaacgggtaaggaaggttgcaaatgttaagatgccaaacaggaacccaaccgaagtccgaagtgaaatacagcctcctctggcccaactgtcatgcaaacaacttctaagcatcttcagatgtaaagaaaaacagtcattgtgcacaggcgttagctgaatgttcgagagttggatgaatggggaagacttgttatacacctagtggtgggtggatttcactaggctgcagcctccacacagcttttctttgctgcactgcagaggcgccatcttctccgtcttaatcttcactcaattcgatccttttatctgcaccctaaaaaaaagacccttcggaccctccccagcatcctgtgcccccaggggaactaaaccagagtccccagagctgccagggaagaggccgcgccttaatcagacaaacgcctccttggatgcacaggacagagcccgtgcctccccaccatccgccactgccctttccagacgcacatcccactctccgccttatttcctccccgccaaggactttacagcccagcacagaattaagcctcggaggtgatccgagggtgggaagcagaggggccccgaggctccgccagaagccccggcagcgtctctgccccctcccaggcggacgcgcagccccgggaagggagccgggcgggagcctcggtggcgcactgagactaacgcggctcggcccacggcgagggcggggtgtcgcggcttttgttcccgcggaccttctgcctctcagacagagcttagggtgcgagcgaactcccgggacgtccagacttggggaaggcgcggggtggctatgggtctccgacccctcccatttctcgcaagttacacaaaagggagacgcggacatgcacaaagtttgcctgtggaaggcggtgcgcgaccccgacgccggctcgggctagggtcgcacccaggctgccgccgccagcagccgcgaaaagaggttggagcaaggaagggggatgggggtgagagaggaaggtgaaacgaggcggagaacgcagggaaaagcgaggggctcctagcttcctgggctgtcccgactcctcctcctcctccccagggcccaagagaaaggaaagggcaacgattcaagagcgaaggactggctttagggacgctgcgttttcggttttccccacgtgctccttcccccttcccccctgtctgaatgtctctcgcctcccccgacccccgcttccaaggcagggactaagtcggggtctgggctcagggtcgccccctacccttctcgccccgggctggcgcggaaccagggagaccagcgcctcgcccgctccctctcagcgggccggagcgcgactccctggggcagggctgggccgaaagcggggatgcgctggacgtccgcaagcgggggcggagaggagaggggtcccattgacggacccccggcttctctgcattaaagacttgggttaaggtcttggggggtatcgcgtccccaccgtgcagcctccccccgccttccgaggcgcggcacccacctccagcgcccgagccgtccaggcggccagcaggagcagtgccaaaccgggcagcatcgcgaccctgcgcggggcaccgagtgcgctgctgtgcgagtgggatccgccgcgtccttgctctgcccgcgccgccaccgccgccgtctcccggggcccccgcgcacgctcctccgcgtgctctcgcctaccgctgccgaggaaactgacggagcccgagcgcggcggcggggctcagagccaggcgagtcagctgatccggcccaccccgctcggcacccgagagagacccctagcggcgccgccggggaactgcgcccgctcgcgccgggaggggccctcgcgccccgcgcccacaggtgcacgcgcccttggcgccgcctgcaccccacgcgccccctccgctccccggccgacggcccacctgggcttcgtgaacagtgggagggagagtctggggccaggagagggacggtgcaggatcagggaaaggtgagtcctaggacgctgaggctctagaaaagtcgagagcgctcctgctcgtccccgtgagcttgaatcatccgaccccgcaggcctcccgggggtgtcgtataaaggactgctgctagggtgcgtttttatccgcatttcgttttttctctcggtttggagaggtggggcaggcgtttctggaagagaatgagaacgagtgaagcttaaaggaaataggattttctttgcttgttgagacagcaaaacctcattttttaacccccaacgtcaaaagcaggcacgagcaacctggaatttctatctttagaacgaaccaaaggagcaaggcgcaggacctggcaaagaagcggccaacccatttacttcttcttgaaagcagggttctgggcttgggttttgtttctttcttatatttttgtttgtttttggttttgttttgttaaagggggtggtcagtgtggattttgcggggcggggggtctttttttgttgttaagcagggatgtaacatccatctgagttggggaagaaggaaaaattaggagagatcattcgtattcgacccccgtaaatgaggacttctgacctcaaacgctgcccttgttcttcattgtgtctgtcctgaattatagaaatgaaccttctgccatgccactttctcctggattaaacacaaaccgtccactgtccagttagtgtccagatagtttagaatgctctagaactgcccagatatatcccctgctcttgacctgaagtagcatttagttaccaagccacagcccactccacacagggcttggagcgaaggactgaagccagggagtgctctggcccttctgagggctgcactgcagcctgccttctctcccttgctcattgcgctgacaagggtgcctaggcccgggaaggatggctcagccagcggggtacagacttccttcctgggaagtcatttctgtaccagctcccctaaatgttgtcttgtgtgtcttttcccgcactaggcattcagtcttgactcttggattacttttgcccctgaatgtcctttggatgtcctcaacaaataaggacaaatatttattgtcatgcagtatttgtttatacgcttcatgtcatttacttcctacaaaagccaaagaggctgttactattattcctatttatacatcaggaaaatgaagctaatgaactcccaaatctaatagcaagtaagtgacatgaagctgggacagcagggaaaagcctaaagtgacaggacaaacccagttgttcactttctgcaccacatttacccaccgcaattccgtatttgttccgggtctgcatgagcaaataaggcaaaaaagaaggtatctgaatgcaaagagaaacgtggtccaaagctacaaatcttgcagagtccactgcaaaatgcaaacgtgagaccctttgttacattattaagaattttaaggccgggcctggtggctcatgcctgtaatcccagcactttaggaggcccaggtgggcagatcacctgaggtcaggagttctagaccagcctggccaacatggtgaaacccccatctctactaaaaatgcaaaaattagccgagcgtggttactcctgcctgtaatcccagctactccagaggctgaggcaggagaatcgcttgaacctgggaggcggaggttgcagtgagccaagattgtgccattgcactccagcctgggcgacagagcgagactccacctcaaaaaaaagaaaaaaaattaaattaagaattttaagatggcaatggcagagcgttaaaccaagcatggggctcctcccaccgcagggcctgtgagactctccagggttgcatgcccatgaagccagccctgggaaggaggaggcaactttaagagtgagggacttttctttgggaggctgaggcgggcggatcacgaggtcaggagatcaacaccatcctggctaacacggtgaaaccccgtctctactaaaaatacaaaaaattagccgggcgtcgtggcgggcgcctgtagtcccagctactggggaggctgaggcaggagaatggcgtgaacccgggaggctgagcttgaagtgagccgagatcgcgccactgcactccagcctgggcgacagagcgagactccgtctcaaaaaaaaaaaaagagagtaaggaacttttattgagcatgaaattcaaaattgtagagatgagatcataatctataaaaattaaagttcttagatttagcagtttctctttccactgttgaaattcaccacactgacacattccctggtcaagatgttcctgggggaagatgattatgctgctgattgcgtcagaatgatggacattgcctgcatgttctctggttccttcactactcagagatcctgatggctttttgcttttcagccactagctctgttctgcatttaatgccatttcctgccctgaggtgtcttgcagatcctccaagcagaaaacgcaggaacatccctagttataaccctacaaagttggggaaggaaccaacaaccacttgtctgctggaattcctacaacagcatccccatcctagtttcaagtgtctccatttgtgagatattcactggctctccagactgtgcattctatctttgggcatttctggttactagaatgttcttatcccatttaaagctcacatcccccgcctttaaactcccactcagatatccttgtatccccagtgaccaagcagaataattcttttccacacttcagatctttacaaatttgccagcggttttcatgctacttcttcctctagagtcttctcttcacaaggtaaaacaggcacttccttcaacagttgcataatggcatggtttctggttccttccacaccttggccattctctaaatgtgttctggcttgtctgtgtctttttacagtactcgaagtgtgctctgactgctgcaacatgggagatgttgcccactactctgcctggagcctcatgttgcatttgactgttttagtaaccgcatcccactgcagactccaattggtccagataccccatttctattttatgcatagtctgctgggccgcgtttctgtcgtcttgtgtttaggctgttatctgtgccctataaatatcaccaaaagcaatcgttaagtctgagccagatgaaccctgcaggggtgccataacttaccatagactggatggatcaaacaccagaaatgtatttcctcacatttcaggaggctggaagtctgaaatcgaggtgttggctgagttggttacttctgaggcctctctccttggcttgcagatggccaccttctccctgtattctcacatggtcttccctctgtgtcttactgtgccctaatctcctcttgttataaggacagcagatattgggttaggatccatgctaatgacctcatttaaccttaattacatctttgaccctatctccaaatatggtcacattttgagacactgtcgggttaggacttcaacatatgaatttgggggtgggggtacataatatgtccttctttagaacagctaagacttattctataatcctgtcactcatctttggcctttatttccagtgacctttctttcattttcagtctgaagatcattcaactcaacagaaaaaaaaaaaatagaaatggaagagatctactttctgtctgtcctgcatcagcattgcatcatgatccccatgcagctggcttacccctcccgcaatcatcaggctctgaaaagaaagaaaatgaccttttatactttcctttagaaaattttgtcaaagcttaaacattgacatttaatgacatttaaaatctgtattagtttactagagctgccataacaaaatatcacagactgggtggcttaaaccaagaaatttattttctcacagttccagaaaagtctaagatcaagatgcagataggattggaatcctcagaggtctccttggcttgcagatggctgcacccttgctaagtcctcacacgttctttcctctgcacaggtacctctggtatttctgtgtgtcctaatctcctcctcttacaagaataccagccagattatattagggcccacgccagtggccttaatttaattagctcttcaaaggccctacccaaatacagtcatgttctaaggtactgggggttagggcttcaacatatgaattttgggggaacataagtctataaccaaacctctaaaattcccctaaaattattctcacattttaagctactctgatgtccgtccttgggagtggattccttctactttttattcatgtccttttgaaatcagaaaccttcctaggtaattagaatatttctttagctgcttcctggttgaatatatggattacttagccactccagacttccggtagtgttgggaattaccatgctttccatgaagatgtgagcttgctgggtatcatgtacgttggcagacgcagtgacgtatttgagagtttcacatgcctcttaacctgtctttcctcccagaaccgtgtgctaactcctcatcaaagaccagaagtagatcctgaattgtattcattctcatctctttctacctcctccaagacagaaggacatgattaacttctttatctcaatgtcagccttcaatagctacaaaagtctaaactgtaaatagcgttgaagctttgcataataaaattcttttccccagtgatgggcagtttttcacatagtaacattcttttaatctttttttctttttaatgagtagacataaagaaatgcttaaataaataattatcaactaacttacctacatttaactacacatacctaacagacctgaatataggcagaggatgtgacattttacttacccttttattaaagttactgcttcatttattggtctttacttcactagtgcatccataaaatgtttacatttttttaaacaataaaatactcttgaaattagtccttctctgtaatcactacataaaactgctttagagacagccttcagatcaactaaattatattttacaaaatggcttaggtatttcagtagtaactctatggaacaacagaattcactgtttaaccagggaccaatattggcagctggcttccataacttgtttgaggaatgtagtaattccaaggttgctgcaaggactaatgtacaggaatattcctgtattttatggaataaaaaggaagaacgagaggagaaagaaatagatagtacataccaaccccagaggtagggagtatgaaaatcaatcaagtagccagaagatgtaatggagccatgtgggtcttacgtcagttctcttccttagagaactttggataatagggcaacaatatgctctggtggaaaagaactcaggccttgagaaagcctgagcactacagtttctgaagaatgctcctttcattaggtggtgtggtgatgaattgtaaaggcacccagcacagtgcctggtttaccatagaaatcggttcttttttcttgagagaacaacaattcgcaatagctgtcacttaagtgaccagcataatcctggctttgagcttgccaggggctgccagttagaacaatggctgtcaaccccgtgttatttatttagatttcctaagtaatgttttgctaataaaagctccaaatttgtgagtgatttactcttgttttatttatttaataaagtggcacgatttattaatttaattaattatttaattaattattagcagtggcacaatctcagctcactgcaacctctacctcctgggctcaagtgatccttcacctcagcctccagagtagctggggctacaggtgcgcactaccatgtccagctaatttgtgtactttttgtagagatggggtcttgccatgttatccaggttggtcttaaactcctgagctcgtgatccaccctccttgatctcctaaaatgcagggattataggcatgagccactgtgtctggttgatttattttaatttaaataaaagcaactcgaggttagcatcatatcaggctactctcagttgtattctagtatctctcttgagtgtgggagtaagggatggagctgtagctagtttgctgagaactggacaaaaccctgaccactccctagggcgtgtgcctaggatgtgaaagatatgcctcctgttttcagacggcaccgtgcttggaaaggctgcttgccagaggtgttgaaaggatgccactgggctggtcctgcacaatggaagaccacatcacatgctccaagagagtcactccccagagcagctgcaggaagccacagctctgtggcctgggatccttgccacactgaatattagtgatagacattggagccgaggggatcttatgcttcaaggcagctggatctcttttttactggtcaaatcatacctaaggattgtctttcgtgtcctagagactttgatgagtaattcaacttttaaaatccaagtgaaggctgtggctagagaagcatgagctaaacctaaaatgaatgggaacattacagtctaacaagccttgagaattcaggttcacattccctaaagaaacaacatcctgaatgatgaaacaaacacacaaaccaaccaacaatttgtgatgtgagataccaaaacagacacccctttatcacctaagatggactgtaaggttaaggaaacaaagttacctacagggttagggttcggggactggctggcatgaccaatttctcaatttctatggctctaaactccctaataataggaactatcagccccatcctgtgatttacaacccagaccactacaactctaattggaatgaggaccagccttacaaacattcttttctgataagcaattgcagaccttaagccagtgtcagccagtttattagaggctgtgcacaaactgtctttgggtcctgtagttcaccttttgatgtaaagagccaaattttacctcattttaacactaaaaccctgccccaaagtgtacatgggatgtcacatacatatttacccattgcacatgcactcagctcccctcataaatatgtatatcttttcctccaaacctgctgaatatgtatgactccactgtgtgaaacagaccctgtgaggcatgaaacccaactgtccttcctctcttttgaagagagaccacattcagcatacaccgaagactatgtcttccgggtttgcaaattgatattgccaataaagctctcctttctgttatttagccatcacgatggtcttttgaatgataaattcacaaaagcaccaaatcattcaatatacaacgttgtccctgagcaaacacccaactttatcccttaaataacatttttgtcccgtgtgtaatttattcagttaaatataactattagaaatgaaagtgttcagtattggtggatcaataaaaaatttttatattctcactttgggtgggaattaaaaaaaaactggttcatttgctcccattaaggagctaatgtttatatgagaaaaatatctgggcaagaaaaagaaaaggcacagtgaaaaaagtacatcagtaaatacaatttagtataaagtatttgtgcacatatatgtgaattcatcagaagaaaagtaaggatcaggcctggtggcttgtgcctataatcccagcattttgggaggccaaggcaggaggatcacttgagcctaggagttcaagaccagtttgggctcaaaatgagaccctgtctctacaaaaaataaaatatattttttaaaatttaaaaattttggccaggcatgatggctcacacctgtattctcagcactttgggaggtcgaggtgggtgggttacttgaggtcaggtgtggtggtaggcacctgtaatcccagcaactcaggaggctgaggcaggagaattgcttgaacctgggaagtggaggttgcagtgagccgagatcgtgtcactgcactccagcctgggcgacagagcaagactccgtctgaaaaaaaaaataaaataaattaaaaaaataaaaattttttaaaaagaaaatgagagttacagacctgtagcgttggaagggtgaataagggaccttcagaggaggttttttgtttttgttttttatcagggtatttgataacaaccattaagaaagaagaaaggaggatgttcgaaggagaaaccatgtaaatacatcaagagtgttcatgatgggggtggtaagtgggagttagctataggaagaggtttttttttttgtttttttttttttgagactgactcttgctctgtcacctgggctggagtgcggtggtttgatctccactcactgcagcctcccccgctgccccgggttcaagtgattctcctgactcagcctcccgagtagctgggattacaggcacgcaccaccaggtccggctaatttttgtattttttagtacagacagggcttcaccatgttggccaggctggtcttgaactcttgacctcaagtgatctgcctgcctcagctgcctaaagtgttggaattacaggcatgagccagcacaaccggccaggaagaggtcttaatgttagaagacctgaggaatttaggtcagatggaataggcagcagtgggcaattagtcactacagatttaccaatcatgatctgacattttaacatttctagaggcttgtccacggggaaagtatagggagattcagaggatgaaaaagttgagattgggaagagaaggaagaagaatgtgccagaggttccaggaatgaacatagatagggtctgtgaaaagtttgtgaaaaaatcacacaaggacatcttattactaataaggatgcctaaggattacagtatgtcaggctgaggacgtatacagacgggatctctgaatactcatgagttgtattgggttaacattgcatgtcacaaatgaagaggtgaaagagtaaggggaagagaaaggagggtttgtacccagttctgtctaacctggacacctttagtgacaatgctgaactgcaaaggagaaaaagtgatttgaaaactttttttttttttttttttgagacagagtctcagtcttgctgtcttgcccaggcttgagtacagtggcgtgatcttggctcacggcaacctccgcctccagaactcaagctatcctcctgcctcagcctcctgagtaggggtgggattgcaggcacacatacacctggctaattttttttttttttgtattttgtatttttagtagagataggggtttcatcatgttgcctaggctggtcttgaactcctggcctcaagtgatccacccgcctcagcctcccaaagtgctgtgattgcaggcatgagccactgcacctggcctgaaatctttttttttaaatgagggaaataataaatttaatgttcattttgtaggtggaaatcagaagtacatgcaataggaattaacttgaatatgatgcataaagtttgaagcaaaggtgagtgatagatgaacattggtgatgtaactccggaagttgtctgtcataactgatgacttatccccatcatatgtgctgaaaactactcagatgaagttaacaacctgatattacaaaataagcatatatattttgtgtttataagaacctaataatcatctggagacttagtacttggggggtgagctatagatagccctgtgtatcagggttttccaaacaaacagaaccaatgggatatatatagatatataaagacacttcttataggaattggctcaggagattataaaggccaagaagttccaatatgtgccccctgcaagccgaagaaccaggaaatccagtgtaattcttgcatgtgaagctgaagggctgaagagtgtctgctggtattgaaggctcaagaacctggagctctgaagtcaagggcaggagcagatgatggatgtcccagcttcagaagagagagcaaatttgccttcctccacctcttttatgattcctatgctcagttaattgaatgatgcccactcacattagtgaggatgggtttttgatacccagtctattgattcaaatgctaatctcttccagaaatactctcacagactctcccagaaataatattttaccagctgtctgggcatcccttaacccaggatgggctaagagacaagtggacacataaagttaaccaccataccctgtaaatatggtatgagaagggatcgagtcatatttcatatcaagattattttccaatgcatagatgccttggaataatacttcttataaaataatgagtaacattttctagcacaagttccaaactgtgtaccatggaaccctagctcggtcatatgttgctcggtattgcatgcatacccgaaaagaattctgtaatcaagtaactttgagaaataagaggttaaacaaaattaaacaaataccttcactttaaaatgcatacaattctttaagatgataatctgcattttgaattttaaagagggtaggtagcttcagtatgtagcatcactccctctccctatttcttttttcttttttttttttttgagacatagtctctctcttttccccaggcatgatctctgctcactgcaacctctgcctccagggatcaagcaattctcatgcctcagcctcctgagtggctgggattacaggtgtgtgccaccatacccggctaatttttttttttgtatttttagtagagatggggtttcaccatgttggccaggctggtcttgaactcctgacctcaagtgatccacccacctcagcctcacaaagtgctgggattacgtgcacacacacctagctaatttttgtattttagaagagacggggtttcaccatgttgactgatctcgaactcctgacctcaagtgatccacctgcctgggtcacccaaagtgctgggattacaggcatgagccaccgcgcctgcctggcacctctccccattccttgtttttgtttgctgcaccaactcctagtgttgcacaaagcatgctttagggaatgtggtttggaagcattcgaatcaaacccttgaatttttttagacccttgtagaagtgaaggtttatagtgtacatttttgtcaaagcagatgggttcttttcactgaaagttgttttcacacatgaccttgaaaataaattaataaaaaaaaagtagaaatattaggctgacagacattttaaagtagggcataagatgccataaaaagccttttgaaagtttaaaataggagttaaagtgtgtgttatatggaagataccagattagagtctttgaatatttattatataaatgtgcaagtatatgaccagcttcttcccagtttgggggagtaatgggacggcattcagttcacatttgagactgcttctctttaaattttcgtaagtgaaaaggaagaaggatcactaagtttacaaagacaagtctcggaataagactttcgttcactgtattgcctttaatcatctggtgggagggccctcaagaagtggccaaggccctatgaagattggtgaagagtttcaaggaggagaattgaaggagacagctatgggattaattttgagagatgcctttgctgaaatgtctcataaaatatacatggagagcaagggcacaaggagacagagaactctctcggccaaacaataaatcagaatttccatagtttttctctgttagtccttattgaaaaatttgtctactgctaatggtgtcaagtagccctgccagccctcattattgtaccaaaaagcaaaacgaggaaaaggtttagggagctaggtctaaaaggaatatcatttctgtttcccaacaattagtgaaaacagattctgttaccaaaatcttgcagaaccaagggtcctaatacccactttattctggtgagtttgtcagtcgataaaaaatactaacaggccaggttcttttctcagataaacagtaaaataacatggttataaacagaaaaaaaatggtgaaaacacaaatcttggtgtattaggccattcttgcattgccaaaaagaaatatctgagactaggtagtttataaagaaaagaggccgggtgcaatggctcacacctgtaatcccagcactttgggaagctgaggtggacagataaccttaggtcaggagttcgagaccagcctggccaacgtggtgaaacctcatctctactaaaaatacaaaaattagctgggtgtggtggcatgcacctgtaatcctagctactcaggaggctgaggcaggagaatcacttgagcctcagagcagagatagtgccactgccttccagcgtgggccacaggatgagactccatctcaaaaaaaaagagagagagatttaatcagcttatgattcttcaggctttgcaggaagcctgatgctggcatctgcttggcttctggtgaggcctcaggaaacttacaatcatgatggaaggtgaagggggagtagggatgtcacatgaccagaccgggaacaagagaaagcatggtgccacacacttttaaacagccagatctcatgagaagtcactcatcacaaggacagcaacaaacagatagtgctaaacgattcatgagtaatccacccccatgatccaatcacctcctaccaggtcccgcctccaatactagggattacaattccacatgagatttgggtggggataagtacacaaactatatcattctgccccagcccctctcaaatctcatgtccctctctcatttcaaaatacaatcatgccttcccaacagtcctccaaggtcttgacttgttccagcattaactcaaaagtccaaagtccaaattccaagtccaaagtctcatctgagactcatctctttccatctatgagcctgtaaaatcaaaacaagttatttacttccaagatataatgggagtaccagcactgggtaaacattcccattccaaaagggagaaatcagccaaaagaaaggggctatagtcttcatgcaatttcaaaacccagcagggcagtcattaaaccttaaagttccaaaataatttcctttgactccatgtcccacatccagggcacactggagcaaggggtgggctcccaaggctatcagcagctctgcctctgtggctttgcagctgggtacagccctcatggctgctctcacaggttgttgagtgccatggcttttctaggcacaaggtgtaagctgctggtagatctgccattctcaggcctagaaggcaggggcccccttctcacagctctgccaggtcatgccccattggggactctgtgtggggtctccagcctcacacttccccttgtcactgccctagtagaggttatctttggaggctctgcacctgcaacaagtttctgcctgggcacccaggctttcttgtacagcctctgaaatttaggttgaggctgccaagcattctttaatcttatattctgtgcacctacatacataacactgtgtggaagcctccaagtcttatggcttgcattctccaaagtggcagcccaaactgtacctgggtccctttgaaccgcagctggagctggagtggctgggatatggagagcagtgttccaaggctgtgcagggcagtggggccttgggcctagcccacaaaaccattctttcttcctaggtctctgggtctgtgatggaaggagctgctgcaaaggtctcttaaataccttcaaggccttttccccattttcttggatattaccatctggattctttttagttatgcaaatatctctagcaagtggtttgctctgcaacctgcttggattcttcccatgaaaatgggctcagcttttcaaccacatggccagcctgcaaattttccaaacttatacgctgtccttcccttttaaatatgagttccagctttaagtcacttctttgctcctatatctgagtcgggctgctagaagcagccaggttaattcctaaatgctttgctgcttagaaatttcttctgccagataccctaggtcatcactcacaagttcaaacttccacacacccctggggcatgaagagaatgcagccaagttctttgctaatgcatagcacatgtgatctttgctccaattcccaataagttcctcatttccatctgagaccttggcaggcctggacttcactattcatatttctgtcagcattttggtgacaaccatttaaccagtttctaagatattccaaacttttcctcatcttcctgtcttctgagctctccaaactcttccaacctctgcccagttccaaagttacttccatgttttcagatatctttatatcaatgcccccattactcagcactaattttctgtgttacatcgttcttgcattgctgtaaagaaatacctgagatgggtaatttgtaaagaaaagaggactatttccctcacacttctgcaggctttacatgaatcacagtgctggcatctgcttgacttctggtgaagcttcagggagttttcaatcatggtggaatgcaaaggggaagcacacacatcacctggtgaaagcatgtgatgagcaagagagagagagcggttgggggtgttgccacacacttttaatgagaccagatctcatgtgaactcagagggagatctcacttatcaccaagggagtggcccaaggcattcatgagggatccacctccatgattgaaacatctcccaccaggccccacctctaacactgggattatacctcaacatgagatttagacaggggcaaatatccaaactctaccacctggttttcaggtcattctagagcactagcagctaccctggcttaaatcctgaaaagtatcaaatttatgtgtttttgaccgacataagaaaacaggtcaaagatttgcttagtccattgtaccatttctgccttaactacttgggagctactgggaattttctatttttaaaatcaggttgtatcaagattgtttggtgtttttcttttttcttttcttttttttttttttttttttgagacggagtcttgctctgtcgcccaggctggagggcagtgacgcgatctccgcttgcggcaagccccacctcccgggttcacaccattctcctgagcgcctcagcctcccgagtagctgggactacaggcatccgccaccatgcctggctaattttttgtatttttagtagagacggggtttcactctgttagccaggatgatctcgatctcctgacctcgtgatccacccaccttggcctcccagagtggtgtgattacaggcgtgagccactgcgcctggccctgtttggtgcttttcgaccaaaatctctaaacaactccaaaagccataaacagactaagctagaaaaaggcagacaaagatattagaaactaagcttgagtaactcaagtctttaatgctgtcttactagtctcagtaattcagcacctaggaaacatccacagaagacattttatcaatcaaaacaaagaagctcgggcaagcacagtgatgtgtgctcactcatagatagacttgtttttgaaattagtcttcagtgatattcattcagtgtgagatttagtctccataaaccgaagcacaacacaacttgaagctttactggacccttgggagtgagaagcagttctgtaatgtgtctgtgattaagtagcagtttcatcctgatttttcaagctcagagctctctaccctttcacatgcttgaagacaagatgttggacaactggcccagaggatgttttcctctcatttctgtaatcttctgataaggaaggaacgatgtgacttaacatgactctccttcaatctgaacgtgccagtgtaccttctttcccatcccactccatatatactctgtgtctgtcttttgttgttgttgttgttgtttgttttttgagacagagtctcactctgttgcccaggctagagtgcagtggcataatcatggctcactgcagcctcaacttccagggttcaagcagtcctctcacctcagtctcctgagtagctgggactacagttgggtaccaccatgcccagctaatttcttcaaatttttcatagagatggggtctcattatgttgcccaggctgatctcaaactcctgggctcaagcctcccaaagttcagggattgcaggagtgagccactgtgtctggcctccgtgactgtctgaagtctctctttcacaactctcttacagttcctgttagttgaggaaaaaaaatctggaattacagtgtttacaactgaaagggatgaagtagtcatttaggccaagtctttaatttgatgaggacttactggagagccagataaatgaagtcccttgcatatggtcatatgaatatttattggcaaagcttggcctttgtcctcctgacttccagatctcatttcatcttgtggtgcttccagcatctggccaccttgctagacctgagtcataaaagcaatggggcgctaagaccagccatactataggaagtggtgacagtttcctcatttaaagttgggttgtctttctagaatcttagagttggaactcaactcagaaatcacctgtttgatcctcccacaaaggcaggtgtctctcttgcaatattcttgagacaatcatctggcttctgcctccttattttctattatcgggagccagcttcaggaaataaaacatttcactagaatttttgtgttgttacatttagctaaaatttaccttctcttcacttctgtccttacatcccaacactgccccatgcagtaacaccaaatgcaaagacagactgtgctttcgaccacagggcactcctctagaagtgttaaaatacttatccagtatttcctcaagcttctctttttttctcaaagctaaatatctgatttttctaaactgtgccttataggttacagttgctggatcccttgtgatgctgaactttggatgtattccttttggcaaaatgactgtatcctacttatccaccaatttgacagatatttaataagcacctactaagttgcaggagatttaaaaaatacaagcatgtaaataagaaaatatacaaagtgatatataacaatacaggctgtggagaaaaattaagcagagcaaggggagatggaaaatttgtgtatggttaggagcttgggaccttgctattctattaatacagtgatcaggaaaggccccactgatgtagtgagctttgagcaaacaagtaaaggaaatgagggaggaagacttgcaactgtttggggagagaggatttgggcatagagaatagctcctgaggcagaaataagtctgatgtgtttggagaacagcgaggtggcccttgaggctccagtggagggcgtgagtgggagagtgggaggaagtgaggtcagggaggttgttatgggctgaatggtgtctccccggaattcacatgttgaagccataagccccagaacctcagcacatgactgtatttcgagataatgtctttaaagacctaaaatgaggtcactagggtgggccataatccaatatgactggtttcctcacaagaagaggaaattaggacacagatgggcacagggggaagaccatgtgacgacacagggagaagagagccatctataagccaagcagagaagcccccagagaagccaatcctgctgacaccttcatctcagcttccagcctccagaattgtgagaaaataaatttctgttgtttaaggcatccagtctctggtactttattatggctgtcctagaaagctaacacagaggggaaaagggccagatagtataagaccttgaaaaccattttaagttctttgagcagaaggggagccagtgagggtttcggagcagatgaaggtgatgactgggctcgtattttaaaagcatcactctagcttctgtactgaaagcagtctatggggaggcaaggacagaaggaagaaaaccaggaggaggctattgcagaaatgtacatgagggtggaaggtggtgaggagagggaagttttggaatatattctgaagttagagccaaaaggattttctgatgaactgaaattgtgatgtgagagaaagaaaggagtcaaagatgacccaaggcttttggccacagcaacttggagaacggagttaacattcattgagatggaaagaactgtaggagcagcgggcttttttttccttcttcaacttttaagttcaggggtacatgtggaggatgtgcagatttgttacataggtaaacgtgtgccatggtgatttgctgcacagatcaacccatcacataggtattaagccctgcgtccattagctatttttcctgatggagcagtgggttttaagggggaggaccaagagttcagtatggacacattaagattaagatgcctactcatctttgagtttgaaatgccagctaggctgttggatgcatgaatttagaattcagaggagtggtcagggtaaggatacagatggtactgagtgagatcacttagggtgaaatgaggacaaaaagaaggctttggaggctggggattgtggctcatgcctgtagtctcagcactttgagaagccgaggtgagtggatcacttgaggccaggagttcaagaccagcctggccaacatggcaaaaccctgtctctaccaaaaatacaaaaattagccaggtgtggtggcaggcattgtaatcccagctactcagaaggttgaggcatgagaatggcttgaacctgggaggcagaggttgcagtgagctgagatggcactactgcactcctgtctgggccacagagtgagacctggtccccctgagcacccccccaacaaagtaaaggatttgggattaagccctagtgtacttggaaatgttgaggttgttaagatgagcaggaaaaagagaagcaagcagaggaggggcagcgagtggagtaggaagagaaagagggtggtttccaaggagccaagtcaagaatgtgcttcgtgaggacagaatgattactgggttgatgctgcagatactgtgtgtcaaataaggtaaggactgcattgtatttagtgatagagaggtcattgctgacactgacaagagccagttcagaatggtggggacagaagtatgatttgagtgggctcaagagagagtaggggaaagaaatttgagtccagcaatgattaaaatattctttgggaagacttttgctgtgaagggagcaaaaagctgaaggtagctaaagagagataccaagagaaggtaattttattattattttttgagacggagctcactttgtcacccaggctggagtgcagtggtgggatcacagctcactgcagcctcaacctccttcactcaagcgatccttccacttcagccttctgagtagctggaactacaggcacgtgcaccacacccagctaatttttttatgagcttgagcctaggagttcaataccagtctgggcaacatagtgaagccccatctgtacaaaacaatacagaaattagtgcttgcttcagcagcacctatactaaaattggaatgatacggagaagtttagcacagcccctgtgcaagaatgacacgcacattcataaaacatttcatatatttgtagaagcacataggaaaaaaaatacaaaaattagccaggtgtggtggtgtatgcctgtagtcccagctacttgggaggctgaggcgggagaatcacctaagcccagaaggtcgagcctgcagtgagctgtgattgcaccactgcactccagcttgggagtggagtatcgcccagctggtcttgaacccctgggctcaagcgatcctcctgcctcggcctcccaaagtgcttagattacaggtatgagctgccgcacctggcaaagaggctttttttaattgaatatgtgaaaatatatttgtatgcagaggagaatgattctgtaacaaaggaaaatggacaaagcaggagaaggaacaattgttggaacaatgtcctagagtataagagagagtggcacactgaatacaagcacaggagttggtcttagatgggactgacatctctagctatattaccttatagacagccacatgtagctatttaaatgtaaattaatttaaaatgaagacaattaaattttttctggctgggctaggtggctcatgccacctcagcactttggaagcactttggaaggtcgaggtgggcggatcacgtgatgtcaggaggtcgagaccagcctggccaacatggcaacaccccatctgtactaaaaatacaaaaattagctggatgtggtggcatgcccctgtaatcccagctactcgggagcctgaggcaggagaatcgcttgaacctggaaggcggaggttgcagtgagctgagatcgtgccactgcactccagtctggaggacatagcaggactccatctcaaaaaaaaagaaaaaaaaaatccgttgtgctagccatatttcaagtgttcaatagctgcatatggttggcgactacagtactagacagcagcaacaaagaatattttggtcattacagaaagatctgctgagcatgcctgagctgagaaatgagggaaggcagacatatgtatgagcgcctatgcagagaggtgagtagatgtggttgcggggagcttgtggaaagtctttcctgatttcttctgtttctcactaaaggctacttaggagaaggacctggagctttgaggaaaaggtgcagactatatctttaggagatagagagagtgaggggacacggggaaaatggcagaattgcagaacaacttttaagatccacttcaggccagcacagtggctcacacccgtcatcccttttttaaaaactttgagacagggtcttgtgctataacctagactggagtgtggtggagcgatctcggctcactgcagcctcaacctccttgactcaagtgatcctcccacatcagcctccactacacccgactaatttttgtatattttgtagggacagggtttcactatgttgcccagactggtctcaaactcctagacttaagcaatctgcctgccttggcctcccaaagtgctgggcataagccaccacaactggccacacctgtaatcccaacactttgggagaccgaggtgcgagaatcgcttgaggccagttcaagatcatcctggacaacgtagtgagacctcttccaaacaaaaaagaattttaaaagttagtcaggtgtgaccgggtgtggtggctcatgcctgtaatcccagcactctgggaggctgaggtgggcagatcacaaggtcaagagatcaagaccatcctgggtaacatgttgaaaccccatctctactaaaaatacaaaaaattagccacgcgtggtggtgggcacctgtagtcccagctactcaggaggctgagggaggagaatggcgtgaacccgggaggcggagcttgcagtgagctgagatcgcgccactgcactccagcctgggtgacagagcaagactctgtctcaaaaaaaaaaaaaaaaaaaaagtcaggtatggtggttgtattagtccgttttcatgctgttgttaaaagacatacctgagaacgggcaattaacgaaagaaagaggtttaatcaacttacagttccacatgcctggggaggcctcacaatcctggcagaaggcaaggaagagcaagtcacatcttatgtggatggcagcaggcaaagagagagcttgtgcagagaaactcccatttttttttttaagccatcagatctcatgagacttattcattatcatgagagcagcacaggaaagattcacccccataattcaatcatttcccataattcaatcattatggaagctgcaagatgagatttgggtggggacacagaaccaaaccatatctgtggtgctcatctgtagtgctacctacttggggggctgaggccagaggagccctggaacccaggaatttgaggttgcagtgagctatggtgggccaccacactccagagccagcccatctctaaaaataatttttaaaatatccactttaggttagtgatctctaatttagggaaaccaatcagcatgctgtgtagttttttccaacttatgttcactggcatgaatgcactgttacagtaggtagaaagctggggctagtccaatgagtggttctctatcctggctgcatgttagaatcacctgggtgagttatttaaaaaaaaaaaaaaaaatcagaagcctcatccttgtagccaaaggatctgattgaacattctgaaaatggggcctgagcaacgaacaatctatttaaagctcccaaggtgattctaacacagacatgctttttttttttttttttttgagacaaggtctccctttgatgctcagactggagtgcagtggcgccatcttggcttaccgcaacctcagcctcccaggctcaagcgattctcctgcctcagtctcctgagtagctgggattacagacgcatgctactaccacctggctaattttttttgttctgtttttttttttttttttgtatttttattagagatggggtttcactgtgttggcctggctggccttgaactcctgacctcaaatgatccacccacctcaatctcccaaagtgctgggattacaggccagatacgtgtttaagaaccacggagttagagtaagaatgtggaggaaatgtgcagagtagagatgaaggatggggaactgtgttactgatggatcatgggttccacaggtgcaaagaaaggcactcaggatttgtgcagggatgggggacgggatgagattgagaagtgttcaaggctgatgagcaatgagagatgggctgggaatctagggcttcttgggtgacaaatacaaattgggtaaagggcacatggagatttgccatgctggtctaaatcagcacaatcaacataaatgtagtacagataattttaaatcttttattgaccttactagaaaagaaacaagtaaacttagtttaatagtatattttgttatccaatgtatgcaaaatattatttctttttttgttgtttttgcaaatttcttaaaaaaaaaaaatacagacagcatcttgctttgtcgaccaggctggtctcaaactcctggcctcaaactcctggcctcaagcagtcctaccacctcagcctcccaaaatgttgggactacacaaatgagccaccacacccagccccaaatatcatttcaacatgcaatcagtataaacattactgagatatttgtcatccttgtttttttatagttagtcttccaagtttgtgtgcattttacacttcaagcacatcccagttcagagcagacacatttcaagcgctcggtaaccacatgtgcagtggaccatgcaggtctaggtggtggtgatgaggtcgcaaatgttggatgatctctacagaacattcctttcagaatacaaacatactataatatactcaatcttaaggcagctgtatatgattatatagaattatgttcttatttaacccaatatagcttttccagaaaagtatcatgagagtcttagtcacatgctctgctaaagtccaaaaattccatgttggccacacttatctaatagaaattagtctggcatgaatttcctggtgaatccgtgcgagcatcagcttccagaggtgtcagtttcttttttctgtgtattctcatgccagtcttttaacaatccagtctgcctgcttgctttcatttgtgtggagctgatcttttcttattttctgacagttgaagttacttactctgggggagaaaggacgatgggaaaatgagcaaccacttgccatttaagtggtagcaaagctggatttgatttattagacctgatgctaggattccagattattataagcaagaaacggcttgcattgcttgtggaggatcacgtgacaaaggattgaccaatcgaccatggaaataacttgaaactaagttgccaaagagggggtggttggaggacaatgtctagataaaagggcaccaagaaaaatgaaggaaaggatgttatggagagaaaagcaacagagaagagtgccctcacacgtgctcgcagaaaaaaatcaggaagtcgactggggaaaaaaagtttgtgtggatgcttctctgtctacgtactgatgctcagagtgggaaagaagcaatctggtattttaacacagggaagtagacatggcttcatagatgacaccaagtgttggtagaataaaactgataactagagttaaggaatgagagtatagttctttttcaaaagaaactgacctgggagtatgctcttttgcttgcccagctggaaaaacatttaaaagctccctcttcaaacagacagcttgagtagccccagacccaggcgaactctttgtcattgtccatgccattagggcaggattttaaaacaggattctcacatcactgctctacgttggaacactgaatcagattatctttatcagacagtctacactctattccccctcttgttctggttttatgcatttctgtgctagactgagtacataatttgtcaataaagcacggattttgtgaatcagacacatccatgttaaaccggggtccatcatttcccacatggtgacatcattcctattagctaagcttagtctctatcctcctctacaaaatgaggataatgcaacatactccctggggctattatgaggctcctggggctattatgaggcttagggatgacatctgcgaagggcttggcaccaatgggcattcaataaatgctagttgggtatcgagactgtggactcaatttagacaaagatttttcatctggtttagctggttattatatatgacaaaaagagatcacaatgtgatagttggctaaagcagtctgagtcttaagtgaattctgctcagggccttaaaaatagacaaaggaaaaatgagagccaggctgggacatcttcaacaaaagtttgacatcattcttgtgaaagtattgggaggattctgatgggtggcctttagtctgacatatttcagccttcactctttctcatcaccttattgagctataattcacataccgtacaattcactcatttaaactgtacaatttaatagtttttagtatattcacagaggtgtgccaccattgccacagtcaatttgagggcattttcatcacttcaaaaacaaacccctctgcttctctctcccccagccctaggcaaccactaatctacattctttctctgtagatttccttgttctgggtattttatataaatggaatcatacattatgtggtcttttgtgattggcttctttcacttaacataatgtcttcaaagttcatccatgttgtatcacgtgtcagtacttcatttcttcttatgaccaaataccattccactggatggtataccttatttcatttgtctgtttgtcaattgatgggcatttgggttgtctccaccttttggccattatgaatactgttgctgtaaacatatgtgcataagtctttgtgtgggcattaaaaataaaaaatttcctttgagtatatgcctaggagtggaattgctgggtttcagccttctcttggtttttctgttacagggaagatcaagagttaaggactgtaccattatccccctaaaagactttcctgtaagaatcttaagttaataatgactgagcacctactgcataccaagtactattgtaggcactgggcagcttcagtaggcgtatcggattctagtctctcctgggtcaagatggagcctgacactagtgacaacttttattcacagcagtcataattgtaggctaccttatgggaacatctggtatgcccaacttacagggttgctgtgatactttgagtatcatgctttttctatttacttgtgtatgtctgcctttagctagaggcagtaaatgtggatcaaaaataaagatgtggggcccggcatggtgactcacgcctgtaatcccagcgctttgggaggccgaggcaggcagatcacttgaggtcaggagttcgagactagcctggccaacgtggtgaaaccctgtctctactaaaaatacaaaaattagccaggtgtggtggcgcatgcctgtaatcccagctacttgggcggctaagacaggagaattgcttgaacctgggaggcggaggttgtaatgagccgagattgcaccactgaactccagcctgggcgacagagcaagactctgtctcaaaataaataaatacatacatacatacatacatacatacatacatacatacatgcatacatatatgcataataaagatgtatgactttctttattgttgttgttttgagacaggatttcactctctagtccaggctggagtgctgtggtgtgatcctagctcactgcagccttgaactcctgggctgaagtgatcatcttgcctcagcctcccagacacctgggactacaggtgcacaccatcacggctggcgaatttatttatttatttattttttagagatagggccttgctgtgttgctcaggctggtcataaactcctggcctcaagcgatcttccactttgacctcccaaagtgctgggattgcaggcatgagcctccacacctggtgcagccgtacagctttcaaaaatgaagagaggaactcgtgggcactactggcatacatctaagaataaaatgtgaacaatctggttgttgtgttataacaacttggttaatacaatatgatattgatgagatgctcccaactcatcttggagtaactgaatgatgctacctgaaaggtagatatgagtaggaagtggaggtatacaggggctggagtggggcaaggaggctttccaggcatggagaaaagtgtaaactaagacacagcttatgtgagaaacaagcatagtacaagtaatctagtgttgctggatcataagggcttctgggataaagaatcttcaaagaaggagagatataattgcttaacatacagctcaccaatgggattatgcaatgatttataactgtcccctagatagctgtgtggcatcagacaagccattaacatctctgtgcctcatttgtcatcaaatgctgcatgggaataaaacgtcatgaattatctcctttctaaagtgacacatgaattgctaaaaaaaaaaaaaaaagaaaaattaagttctaaagaactttctttttttttctttttttgagatggagtctcactctgttgcccaagctagagtgcagtggtgcgatctcggctcactgcaagctcctcctccagggttcaagtgattctcctgcctcggcctcctgagtagctatgactataggcgcccgccatcacgcctggctaattttttgtatttttagtggagatggggtttcaccgtgttagccaggatggtcttgatctcctgacctcgtgatccgtctgcctcggtctcccaaagtgctgggattacaggcgtgagccactgcgcccaggctaagaactttctaatattgtcctatatgtagccaagccttgtgcagataaagattattattgccgtttgggacaagtggatgctttcagagagtcttagttgaggtttcctagaggctgaacctgagatagagatccttatgcaagtggtttattgaacttactagttttggaagaaactagtaagaaggtgagggaagcagaaaagggcaggaggagaagcaaatgcaaatgttaaaatagaaggatttaaccactttcaaaaagagggcactcatttacaaagtagtaaaggacacacatttaattatataaaaatgtgcatagatgtttggaaattttgacatgtagtcacagaataatgtgaaaattatatacaattattgacattcaaatagcagaaacatagaaagtcaaaggttggccatggatgaccctcatcaagggcaaatgtgtacacatctatgcacttatatttaatggcaatgaacttgtcagctacagcctgtttgacatttacagaatgatgtgtgataatgggattgatgaattcattagcattatgaatcatacataaatagaatctttagcacattttattaagtgtgaactaaaatatgttgtttggagaggacaaagattacaaatgttttaaactgggttcccaaagggcaaggaaaattaaacagtcagattccaccctaaatgatcaaaaggtggaatgtacatctcagtcacgttgtgctgatgtggcagtagggccagaggagttttggaaaatccaaagaagcacaaagcttgagtatgagcataaaggaaaacaccaagcgctgagtcagacactggacaagaagttcttttctgatttttcaaatgaaaagactgtacagttgagattaaggttcattaatttattgattcaaccaatatttagagagcacctcttacgtgctgggtcctgtggttgttgctgcagttacagacatgaagaggcaggaatgagctcccaagccaagtatgcaggattgtgtcatttctcgttccatgctttttgctaatcatgtctgggggtttataggctgtgtctacatttgtgtggtttcctagagatttcaaatattaaaaaatatccaaaccccttcccattgccttaaactcttcccttaattcatattccagaattggcacagggaaaaatggatctcttctttcccccaggaaaaaaaccccacaagcttatagttatggtaaattaattggtgaatattcttcattaactattctgtatcttaatttttttccctgaaaaatgaaaatgttacttataccactgggagcattttgctgattattagtatccaaggtataaaattttttgagattctgggaacaagaactcccccatggagagattaaactaccttctcttatacattatagagtttactatcttgatttatttcttcttgttgatctctaatccatccaataaccatagccactagtaattgtgaatatctttttattatatcgggtttcttgtaactttgaggattttgttttagtaaattaaatatattatttgtacatgtaattttgctgcatagaacaactggatttctggataagtagcttgaatgttatgtcctagagaataggagtttattacttgctaatatggcttattacattctgatgaatattttgactatgatctgagttgaattgataggaatacattttcgaagtacttaaaaattatttatggtggttcttttgtagtgttttcctttttataaaaccacactgtctgagaagaactctcttacttctgtgtcttaacttgtgggaacaatttatttatttatttattcatattagagatggggcctcataatgtttcccaggatggcctcaaacttctaggctcatgggaccctcccgcctcagcctcccaagtagctgggcctacagatgcccactgctgtccccgactatctatatgaattatctttatcattgaaaatttaggccaggcgaggtggcacatgcttgtaatcctagcactttgggaagctgaggcaggtggactacttgagcccaggtgttcaagaccagcctgggcaacatggtgaaatcctgtctctgtgaaaaataaaaaaattagtcaggggtagtggtgcacacctgtggtcccagctactcaggaggctgagataggattgcttgagcctgggaggttgaggctgcagtgagctgagatggcaccactgccttccagcctgggtgacagagtgagaccctgcctcaggaaaaaaaaaaaagaaaaaaagaaaaagaaattttatcaatgtgtttgtgctggtgtcagtttaaagcctatagagagtcttggaatttatgggatgttgaatttttaaaaattcatttgtattaagtggactttttataaaagagtaaatacctaattaaaataatattttatctgatgttaccaaagagttcttcatttcaacgttccatccctgagtaagttaacttatgaggaatgaattatattacctagcaacctccatccatcttaccacattgttaaaagcctatattctgcaaataattcacgtaatgaaacaataggcataaattaagttatacatttaattaacatatacataattaaattatatataccaagaaacattaaacttttaaacaattataaccaaattcattgctcatttcttctaaatcgatatttacatctttattgttaatttctaagaaaagccttaataagaaaaataacctaggagtatcttgaattagcaaatgtatgttttatagaaattctacattttatagattctatcactgcttctacagtacatacatttttatatttatggattcattggtatcctataaatagcctggatttttaatataatttatactactagagtataaattatactctagtataatggttctcaggtgcgcatatcagaagacaaacacagagatggttgacattgacatatagcagacttttatccccctaaaaatgcattttttttagcaggttcaaaattggaagcatgaattgaaacaacacagaaataacatgtttgcttacagtggataaattttgtactattttatagaaaacctctacaaatttaagacaagttaccgagcttgttgacaagttatgaggccatatgaaaagcaaacacacaaacaacaacaaactaggcactaagaaaaagtaaaaggaaattaaagttggtcattgcaatttaattaagacaatagtttgaatgcaaatgaagacataagacaaattcaatggaacattagaaattgtcttgcttggtactgtagtttatataagcagaagcggagacatactgaggttaagttttcatccaaagtcaccattagattgtggcagagctggctcctgtctcttgttgagtcttcttttcactgcctgacattgcctcttataaacaggacatggtgccagttaattataattgcttaagaaaaagcaattgaaaaaatggtgaatggtaattacatatgggctgaaataacattgatataatcaggaatatttgggggaggaaacaccattctagaacatctatttcaaccttggcaagctggaatgacaatctgcaactttatttttaccagttatcacttactggtataatgaaacaaatgctaaccgtaaaatttaattattaaatcaaatattaaaataatttataaacatgtttaaatcacattgcacaaaggaaagaaaaggggttgtatcattttcaggcataaaatcatttccttcttccttttaatttgatgttagaccagcttttttcatagtcaaatttgtacggaaatgcccagagagggcaaacaaggagcttaacagatgtcattttgctattctgtgaagctaaatagaactgtagtttattgaatgatttctcttacttctacttctgcttgaatgtagattgggggatggatagtagctgagtccaatttaatttgttcaattactcaccatttgatttatttatatcatatgataaattaatcagtttgttttaatctatactctgtatagggtttacaataagaacatcatttaaagtatggagtgcaactcttacaggttatatatattcattttattttacgaaaatttaatgtcatatacttatgcatttaataatatataccaaatatttataacaattcatcaagcttgacatttttttaaacaagaataaaatttcaagaaagttggaagaaaatacaaagaatttttgctccctctcctcatccatttgaaagcaaattgccaatacgatgccttatgaccccagaatgcctcggtagattacaaatgaagacactatcatacaacaaaatacaaccattgaaatcaggaaattaaccttgatattattaacatcaagcttgccagttgtgtagaaagaggatccagtttagaatcatgggctgcattttactgccctgtctcttaagcatttgtaggctttggaaagtttaaattttttcttgagtttcataaatttgacaattttgaaactcatagcctagatattttgtggactatcacttaatatggatttggctgattttatctcatgattaaatccatgcatctttggcagggatatcacagaaataatgctgctccctcattgcatgctgtctgtggtgcatgactgtgacttgttcagttactgatgatgcctctgtgataactgggttaaagtggtgattgccaggtttcttcacagtcgtttactctttcctctttaagaaataataagtatttcatggtgaagtactttaaaactctgcaaacatctcattcctcttcaaactttcatgttattcatttctttctttatatcttttctttttcttttctttctttcttttttttttttttttttttgagacagagtttcactcttgtcacccaggctggagtgcaatggcatgatcacggctcactgcaacctctgcctcctgggttaaagtgattctcctgtctcagcctcctaagtagctgggattacaggcacccaccaccatacccagctagtttttgtactttttgtagagacaggatttcaccatgttggccaggctggtcatgaactcctgacctcaggtgatccacctgcctgggcctcccaaagtgctgggattacaggcatgagccaccacacctggcctctttctttatacctttatagatttgtggtctacttatttaatggactaaaatccactactatgattatttattttaatgttccaattgttgctgtgggcaccactttgattgcttttataatcttttgatatttctctattattctttaagtatttcctgactttctggtacagcaaaagattctaggctcattttgtactttttctttcccatccaggaattggtcattttgctaaagggtcctgtttctttgtaacgagaatagtatttagaagccaagatttggttgctaaatgtactcattactcttggggtgccactgcctccagactgtttcagaggacaaaaactaaggaatatataataatatgcagacatgcacccatatatatgttacttatatgtctacatttatatacatttataaattcataccaattccttccatttcagttcaataccattgagttcattctatttttctttcatttcaatatttgtagctttcttctctgacagttgagaaacctggtttgccaattatactgaatatatttatttatttcatcacacctgtttccctccaacagtccgctatatgtggctaagcttccattgccattctactctccaccatccacgggtgctgttgcattctgcttaggctctgctggcctcggccaggccatccctccatgaagatgccgtctttttttctttttttgagatggagtctcgctctgtcgcccaggctggagtgcagtggcacgatctcggctcactgcaagctctgcctcccagattcacgccattctcctgcctcagcctcccgagtaactgggacggactacaggcgcccaccaccgcgcccgactcattttttttttttttgtattttcagtagagatggcatttcaccatgttagccaggatgatctcgatctcctgactttgtgatccacctgccttggcctcccaaagtgctgggattacaggcatgagccactgcacctggccttgttatggtgcctttttatttctttgctcctaagaaatagtcctggactttgtgatgctaccttactgtaacatcaatgttaatgcttttaaatattttccacaggtgttaagtcatttattactttactaagtcacagagtgccatacattttatatgaaggatagggatccatttcctcaaattataactgctagtaagacagaagcatagtgtgatggtttattttaggtgtcaacttgactggattaatggatacctacataactggtaagacattctgtctgggtgtgtcacaccaatctcttagatggactaaaccgggaagatccaccctcaacacaggtgagcaccatccaatcggctgggggaccacatagaacaaaaaggcagagaaaaggtgaatttgatttctctctcttctggagctggaacaccctcttctgctgcccttggacatcagaatcccaggttttccagcatttgggctccaggactcataaaagaagcagccctctgtgtaatcaggctgtaagcctcagactgagagttacatcgtcagcttcttttgttctgaggctttctgacttgggctgacccgtgctgccacctctcctgattctccagcttgcagactccctatggtgggacttcttagcttccatgatcatgtgagccaattcccctaataaatttcctgttatctatgtaactatctgccattggcatccaaaccagagtgattcactcttcaataaaggctgaatgaagtgagaccttctaggttacattcccaggaatttaggtactcttggtcataagatgtttatggttgaaggaacaagttaattatgctaattaagacccagaacttaaggaaatgtcctgatatccagatatcttaagaacagaccaggcaaggtggtgcacacctacaatcccagcacttttggaggctgaggcaggtggatcacttgaccagactgggcaatatagtgcaactccatctctccaaaaaatacaaacattagccaagagtgatggcacacacctgtgaccccagctacttaagaggttgaggtgggaggattacctgagtatggggacatccaggctgcagtgagccatgattgtgccactgcaccccagcctatgcaacagaataaaaagcattcttagtttaggaataggtttcgctttaaagattatagtacatccataaattcttgctgatatcaataggtaaacaaaagaagaacaatactaatagactgttacaagctaatcacaagcctttgtataataataaagcacattattcttagttctaacattgtatataagcaagcattatgtttgacgtaggggcgttccttctctcgctttctgaggatgccctactctgtaataagagtagtctctagtaaactatcttaatttcactctactctgctactcacactgaagtcattcctgtctgaaatccaagaacccactcttggggtctgggacaagaccctttttctagtaacatctatctatcttctatctatctcccgcctattggttctatctctttggagaactctaatacacacagtaaagttaagattaacacacagaagcaggtcatggattattcaggtggaaccacaggggacatttggttgggattgcatgattaacgccctaccatgtcatgtcattgatcaatggtcacttctttcctgagcattagcatgtctctaagatttgctcttatctatcaaatgaatgcagaatgccattcatgtgataaaccccaacaggtcccacagaattttcacagtctattgtgtcaagttgtacttaagagagattttttactttatggatcaatgactggatagatcaaaatgaatcctttaaagctatcatattttatcagtttgctgcagttgtcttgcaggctcaatgaaaccatgtttcctagagtccaaaaatctgggaggtgaccatcgactcttctagatgagctggtgttctctgcttaactaactgctcaagttcattccatgagggagaaacctccctttttgactttgaataccactgctgagaattgtgcttctatttcactttgtggaatgcttgaagtgatttttacagaattctttttggaaatgttaatacttgtggaacaaatggcttattgttaaacttggagctggaagacctggatttgaatgcggatattgccagttactagcagtgtgacctcagtttcttcagtaaaacaggatattatcattgtctgacaaagttttttgggcctcagttaaaaaaatgttaagttaaagtcatttcggttcttgaaagtgccaagcaaatgtgaggcactattagtattttgtaaaaagccatttctttaaagggaagacaattcatgaagaaaaaattcaaatgaaagcaaagtaataaataaaattaccgtaagaactgatgagagaattctgattttgtagatggaaatttgtttttgaatttaatgaatatacatatatttactcctttaagtagttattttatgtttcaaaaagattcaaacattttaattgcaaaaagtctttgccttgctttaaaagcaagtttaatttcagggacaatacacctattcattacccaaaccattcctaagcagtaacagccttaagagcctattaatgtaagggggggtgttaagtcttattcaaaatgaattgaacccctgactccaagtcagctagtttatattctaagacaatgaaaattaagaacaatgatttagcgactcgagaagactcaatctaatatgatccgaaaaaggccaattatcgtaactcttttagccaatattaacttctgaatgtgtcaaattctccatcttggaaaaactgtgttgactccagcagacataagaagttttcttctctcattaacaaaccttctatgttagaccagaggaagaagcatttaactggcattattctaaaaataatgaaacaattcaacaaatacatattttataatgattttgtattaaaatagaactggttttacttaattggttgtaatttaaagttcaaaatcttaaaaatatatttgttgtaaaaatgtcaccaggttctgtgttatctcttttcaattttccttgaaagagttgctcattatgatatttaaattcttgtgtcttacatttgaaaattagtactgatttttcaatacaaaaaatcctatcgaaacagcttgaaatcttagcagtctttgtacttttcataacatattttattatacatattttatatacaaataaataattaaaaatatataaattttatttttaatttttttgaaacagggtcttgctctgtcacccaagctggagtgccatggcacgatcttggctcactgcaacctccacttcccaggttcaagtgattcttctgcctcagcctcccaagtagctgggattataggtgtgcaccaccatgcctggctaatttttctatttttagtagagacggggtttcaccatgtaggccaggttggtcttgaactcctgacctcaagtgatccacccgcctcagcctcccaaaatgctgggattacaggtgtgagccactgcatccagctctgtattatatactgtagtagtctgtacaaacaaaagcatgtatagaattttggcattcatgttgaaaatatgaccacagatttcttcttaggtacatgggaagattgccttgtattctagttttaggtttcagcaatttcaccactgaccattttattgaaatcatgtagtgctgtaggtagtcagataatgagatgccacttaaaaggcctgaaatacttggggttgcataatggggatgtatgtactacgttagaggctaattccaaaatttggggaaagactaataaaatgtttctcttgtcaactgaagaatgatgaggttcataaatttagaaaggtgagctttgttttttataaagaattgcagccctcgggtggccattctgacagggttggaagtgtagcctcctgccagaagccagaaaccggcactttgagggagggaagaataagacaggaatttatgctgaatgcggtggttgaatatacatttttgtttgtttgtttgtttgtttgtttagacagagtcttgctctgtcacccaggctggagtgcagtggcacaatctcagctcactgcaacctctgcctcccaggttcaagtgatactcctgtcacagtctcccgagtagctgggattacaggcacccaccaccacgcctggcttatttttgcattttttaatagagatggggtttcaccatgttggctaggctggtctcaaactcctgacctcaagtgatccatctgcctcggccttccagttgtttgtttttgaggcagagtctcactgttgcccaggctggagttcagtggccccaacttggctcactgcaacctctgcctcccaggttcaagtgattctcatgcctcagcctcccaagtagctggggttacaggcgtgtgtcaccaagcctggccaatttttgtatttttagtagagacggggtttcgccatgttggtcaggctggtcttgaacttctggcctcaagtgagcctcccgtctcagactcccaaaatcctgggattacaggcatgagccaccatgccccacctgaatatacatatttaatcagctataggaaaaggcacaaatatacgaaaagagaaacgtgcacatagttgagcttcatgcctgtccatgggcatcatgttcaaaatatggtggcattagtataatctgaggatggagttttcagccctctgactcaaaaggtgaagcaggcaacacaaaaaccctcactatgcatcctctataaaccggccagagccacttcatgttcggtgttcttttgtcaggaaggaaagctgagtggtcgttttgtcaaaactgcaaaaggaaggatagtcacaaggttggtggaaatcactggcggagccagtctttcccaatggctggtttctgtttaacccttaagaaagaaagcctcatggctgttagcaaggttgcaggggaggtgaacgaggcatgttcaatcttccatgtcatcatggccaggagcacagttttcaaggtttctctgcagtaccctttgccaagagagagttctattcagctggttggggggctcaggattttatttttatttctcactcttaaggggaacatcaacttagagggtcttgtccatgagactgaaatgtcttccagttgtcttcgagaagaatgtcctcatttgagtttccctgaaagcagagggcctgagacaagtatgtgggctcaggtagtttctttgggaattaatcccaggaagcagaagtgagagagtagaggcatgggaaaacatggagttattgagctagctacccctgtggaaaactggggctccattctgttgaagagcttctaagaaactttgtggaatccctcagacatgtttcagggaaggacagggagactgggacacccgtctattaattcagtctcccattgattgtgggttttgctagaggcactttggcaccatgcacttccaagtgtgcctgtttaggggagaggcaggctgagttgctttcagtgactgcagagaaatccaaattgtgagatgccacagcacagcttgaggtgggatgctggttgcttgcacagacttgtccttcgcagcagtgctgaaatctagtggccaagggaagtggttgaggcaccacaagtgtctgctacagataagagaaagcaaatagtataaaagaagttattatccaattatttctaatagagttgagggagtgtcattgctgtagggtcatggtctgtacagagtggtgtatgagatgaggacgtgctaccccaaaatatgcctctttggcgtaaagattactttgagctgatcatttttagacactagacacaagagaagttttgaaaacacaaacatttcccttttgtaagggaaacttacacctataaagaaaaatgtccatttgtaagtgtgtctccctctctgtacgaagaagggaaagatgattaaattactagagacccacccacctaaatctgcataacaagccttactcttatttactgtgctgtttccagtcacatccccattactggccttcccaacacccttctttctttgtttcagcagaagatggtgcttaagcctgaattctaagtcacctcttggagatttgctcatttctttgggtatctcccagtatacatgaggtatatatgttattaaacttccgtttgctatactatgcagccataaaaaaggatgagttcatgtcctttgtagggacatggatgaagctggaaaccatcattctgagcaaactatcgcaaggacagaaaatcaaacgccgcatgttcccacccataggtgggaaatgaacaataacacttggacacagggtggggaacataacacactggggcctgtcgtggagtcggggtaggaggagggatagcattaggagaaatacctaatgtaaatgacaaattaacgggtgcagcaaaccaacatggcacatgtatacatatgtaacaaacctgcacgttgtgcacacgtaccttagaacttaaagtataataataaaagtaaataaataaataaacttccgtttgcttttctcttgttaatgtgtcttctgttacaggggtccatctcaactaagaactctgaaagttagaaagaaaattatttttccttccctacagtttaaaatgagagttaaaggcattttcttgtattacacagaagaaggagaatgctgtgatttttcttgattaatgttgagtatcgaaatggatgtctttctataatgactggagtctaattagctatcctgatttgaagaaagcaggttttcagaaacacagtgtcatatgttcctcctaagttcattaagtaaccagtgatctgcaatttggtatcccagatggacctaccctcaggaagtgaatgtcctgtgcaaagggctatttttcagataaagctcccaagatatggaatagtgttgtagaaaaaaattgggttcttgtcatgcgaccaggaaaatttagacatgcagatgcattgtagggtgagtagggcaggatttattaagtgaaaagaaaatgggaaagaggaactctcagcaaagcgagagagagtcctgccagcaggtctcttgcctcacagattgaatcccaggtcaccacccaggaactgaagaggccaggctcctccccgctgcaaaaggtgcagacttcccaaggctccgccctcgtcctcccggtgcataggtggacattattcagaatcagtcgggaaagggcgggtttcatctgggaccagcagtttggtttttcagccttcaggctgttttatgcttggaggtggggaccctttcgccggggacccatggctggcttctgtctctatcaatagcatatttgagtgcagggctgaggcagcctcttggaggcttattatcatgtatcaaattcttaccccagagaaaatcagagttgtgatttgaagcgttattagggtaattgcatctgagattttgaataatcatcaacagtcacctaatctgcatcacttattttataaaaaggctaatagacattaataatttacctaacatcaaatagtttgtgaacagacaggctggaactcttcagactggaattcagttcaatactctgcaatggcatcatagataatatgcatttgtcaatttgcataatcaatattttatttttgtaccatgcaggatcattgtttaagtacacagtgatatacttcctgacctttagaattttaaatcactgggcttagtgaaatcccccaaacacatttaaaaactcatagaaaggcatatgaatgcaagcatttggagtgttctgaataccaaaagccaaaaccagtacaggtaaatgacaagcatcacttaaaaagaatgtctgaacagctggctgaataaatcagccaaagttgaaacactcttttcacttgtctgtgaaatttttcttcctagaagtgagggagtcccttgagggaaagaggataacaggtaagcgtattcactgtttgccacttctagaaataaaatgctgcgtatgtattcatatgtatgatatataacacacaactaaacttttttttttttgagacaatgtctctctttgttgcccaggctggaatgcactggtgtaatcacagctcatggctcacagcccacctcctgggctcaagggatcctcccatctcagccttccgagtggctgggaccataggtgcacactaccatgcctggctaattttaaaattttttatagagatagggtcccattacgttgcccgggctggccttgaattactggcctcaagcaatcctctggccttggcctcccaaagtgctgggattacaggtgtgaaccactgcacccaaccacaagtaaacttttgaatccaaggagacacatggtgtggggtccagactgctgtgaccatcctatgtcaggacaagtctagtgcttcactatcaaagacatttctgaaacatggcctgggcttggtggctcacgcctgtaatcccagcactttgggaggccgaggcaggcagatcacctgaggtccagagttcgagaccagcttggccaacatggtgaaaccctgtctctactaaaaatacaaaaattagcctggcatggtgacgacctcctgtaatcgcagctactagggaggctgaggcaggggaaacgcttggacctgggaggtggaggttgcggtgagccaagattgcatcactgcactccagcctgggtgacacaatgagatactatcttaacaaacaaacaagcaaacaaacaaaaaatgaaagaaagaaagaaagaaaaagaaatttctgaagcagaataaaacaccagccactgaaattggatttaatataagtgctttgtgactttggtttatacttttgttgctagggacatggaattttcatttttacctccagcttggaaccagccataagccagtgtctcctcatggctagctaagagcatttcctagtctgtttgggaaggagatagaacctcattttcctttctacattccctatgaggcactcaaattccttgaaatcatatttcccaggaatcacaaatgaaccaatctaaactctgtggggatgatagactttcttgaggtcctctggatttcctaggtccaaggattggtatttgtggtagtgggtgatgcccaagggtgaaggagaactgttactatattcagaaccctgagagttcattctgtccttcacttgaaggaaaactatcaacaggtaacagcaccccttagacttgctccttcttctgtggatgcccttttctggccatgggcacttgaaggaaatgaatgagagacccaggacataggcgctggggaaggagtagagattgatgtcagctctttcctggaaaggttaacagaaactacagggcatgatttattgaaataatctgggtgaaaatgcttgtatatgctaatcttattttttattttattttgttttatttttgagacaggctctccctctgtcacccaggctggaatgcagtggcatgatcttggctcactgcagacttcgcctccgaattcatgtgattctcccacctcagcctcctgagtagctgggattacaggtgcgtcccaccacttctggctaatttttttttatttttttattattattttttttttagtagagacagggtttcaccatgttggtcaggcttgtctggatctcctgacctcaggtgatccgcccgcctcggcctcccaaagtgctgggattacaggtgtgagccaccgtgcctagcctaatcttatgttttaatttcaaatattatttttataattaatgttcacatcccttatttattgaatgaaaacaatgcaatgggttagataagtgctagaactaatgctctataataaactctaaaaaaccctagccggctgggcgcagtggctcatgcctgtaatcccagcactttgggaggccgaggcgggcggatcacaaggtcaggagatcgagaccatcctggctaacacagtgaaaccccatctctactaaaaatacaaaaaattagccgggcatggtggcgggtgcctgtactcccagctactcaggaggctgaggcaggagaatggtgtgaacccgggagacggagcttgcagtgagccgagattgagccacctcactccagcctgggtgacagagcgagactccatctcaaaaaaaaaaaaaaaaaaaacaccctttcttggtggaaaacgtcaaaactatttaaagggagtgagaatagtataacgaacctgggtatgcatctaatctagctccaacaattatacaatatcagttcacagccaattttatttgatctatatctctctctgtccctcctcaaattatttcgaggcaaataccggacatatttacatttacctttaatcttttcttttcttttttttttttttagatacagggtctcactctgttgcccaggctggagaacagtggcacgatcatgcgttattcactgcagacttgaactcctggcctcaagcaatctttctaccttgacctcccaaagtgctgggattacaggtgtgagccactgtgtttagcctagacttacctttaatagcttttgataagttattttttaatgtaattttgataaaataattgtacctaaaatgtactaatgtgttggtattgtctactatccaatctacgaacaaattttactgattcattcgtaactgaccccagagttggtttgtttgaatcactgtaactgagcctctattataaagatcatacgatgtttgttttacctactttccctttccccttgtccttttcttgctctatgcgtgcttgcttgcatgtcattatttcagtagagggtagtcactaataattgattaacttcatatcctaacctacaggggtgcctggcagattgatgaacttgtttttcttttaaagaaccatgatccttaggttatgcagacctccttgatggtgtccagaaatttgggtagagggatgccaacagctttgatcactgggggagtttcatctcccatatacccaccttactcatacaagtccccagttaaattcaaaggcagggcagatttgagagactgtctctcctgccctcttgctttggtcaaattgaataaacctttctctgttcctgagtgctgatgtgtcagtgtttggcttaccatgcatcaggtgcacagacctaaatttggagattctgtaacatcaagacccatatgacgttcacatactggattaggctgatgactcatatatctctcttttaatgtgtgaccatttacatctctttctctctctcctcccttttttttttttttttggcaatttctttgttattaatggtcttgttttaaagtgaagtattgtcatttaagtttatatatcaatgttatcattatttgtttatttacaacaaagttttatgccaaggcagtcatgccattacccacctgacctgcttttccaccatcagttttacctgtgtgtgtccctggatcatcaggaagcattgattgagaatctttttctcttaatctgccttactattttctaatgtagttactgatcaaacttagcagtaacccactcattttgtgtgtaggcaaaagcaactatgaataaacagaagaagtctcccacagtgggtaaatgtgtggacctgggtttgaaacctgatgaaacttgctggctgtgaccccttgggccagggattaactgctgtcactcttagttccctcaaccctcaggtgcatgtgattatattcactgcctgatatggtttggctctgtgtccccacccaactctcatcttgtagctcccataattcccacgtgttgtgggagggacccggtgggaggtgatggaatcatgggggtgggtctttcctgtgctgttcttgtgatagtgaatgtgtctcatgagatctgatggttttaaaaacgggagtcctcctgcacaagttctctctttgcctgctgccatccacataagatgtaacttcctcctcctttccttctgctgtgattgtgtatcctccccagccacatggaactgtaagttcaataaacttctttcttttgtaaattgcccagtctcaggtatatctttatcagcagcatgagaacagatcaatacagtaatttggtagcaggtagtggggtgctactctaaagatacctgaaaatgtggaagtgattttggaactgggtaacaggcagaggttggaacagtttggagggctcagaagacaggaaaatgtggaaagtttgaaactccctagagagttgttgaatgactttgaccaaaatggtgataatgatatggacaatgaaatccaggctgaggtggtctcagatggggatgaggaactttttgggaagtagagcaaaggttatgtcttgttatgtgttagcaaagagactggtgggattttgcccctgacctagagatttgtggaaccttgagcttgagagagatcatttagggtatctggcagaagaaatttctaagcagcaaagcattcaagaggtaacttgggtgctgttaaaggcatttagttttataagggaagcagggcatgaaagtttggaaaatttgcagcctgacaatgcaatagaaaagaaaatcccatattctgaggagaaaatcaagctggctgcagaaatttgcatatgtaacaaggagttaaatgttaatccccaagacaatggggaaaatgtctccagggcatgccagaggtcttcacagcagcccctcccatcacaggcctgcaggcctaggaggaaaaagtgatctcttgggccaggcccagggtccccatgctgtgtgcagcctggggacttggtgccttgtgtcccagctgctccagccatggctgaaaggggccaacatagagctcggattgtggcttcagagggtgcaagctgtaagccttggcagcttccatgtggtgttgagcctgccagtgcacagaagtcaaaaattggggtttgggaacctctgcctagatttcagaagatgtatggaaatgcctggatgccctggcagaagtctgctgtaggggaggggccctcatggagaatctctgctagggcagtacagaagggaaatgtgggatcggagccccagcacagaatccctactggggcaccgcctagtggagctgtgagaagagggccaccatcctccagaccccagaatgatagatccactgacagcttgctccatgcacctggaaaaaccgcagacaacaccagcccatgaaagcagctaggcaggaggctgtaccctgcaaagccacaggggcggagctgcccaagatcatgggaacccacctcttgcatcagcatgacctggatgtgagatttggagttaaaggagatcattttggagctttaagatttgactgcccctctagatttcagacttgcatggggcctgtagcccctttgttttactcaatttctcccatttggaacagctgtgtttacacaatacctgtacccccattgtatctaggaagtagctaacttgcttttgattttacaggctcataggtagaagtgacttgccttgtctcaaatgagatgttggactgtggacttttgagttaatgctgacatgagttaacactttgggggactgtttggagcacatgattggttgtgaaatgtgaagacatgagatttgggaggggcaaggtgtggagtgatatggtttggctctgtgtccccacccaaatctcatcttgtagctcccataactcccacttgttgtgggagggacccagtgggagatgattacatcatggggctgggtctttctcttgctgttctcatgatagtgaatgggtctcacaagatctgatggttttaaaaacgggagtatgcctgcacaagctctctctttgcctgctgccatccacataagatgtgacttcctcttccttgccttctgccatgattgtgtggtctccccagccatgtgaaactgtaagtacaataaacttctttcttttgtaaattgcccgctcttgggtatgtctttatcagcagcatgaaaatgaactaacacactaccttagagtgttagtgtgaaaagaggcaatgtttgaaaatttttagcttggtgctgcccacactgtgagcattcagtaattgtgagctgtaatgctcactgttgtgttccattcccacagtaatttttgtgtatgtgttttgattttttagacttaaaaaatacagttttagatttatagaacaattgaacagataatacatagagttctatacacccaccccatccctacctctcaatttccctccacaatttcccctattattaacaacttgcattggtgtggtacatttgttaaaattaatgaaccaatattgatacatgattgttaactatagtccatagtttacatgagggctcactctttgtgttgtgtacttctatggttttgacaagagtataataacacatatccactgaaagggatcagaatatgctaccccaaaatattctactttggcataagaattattttgagctgaaggcaatttagaagcagcagactcaggaagagctctctgacctctcttttctgcctaaaagcaggggataaatttcccttttcccatactgaggagaggagaatgattctccattcttacaaccagagagaacttgagtttgtgtagcaaatctcagtaaacagcccttatctaccatgtacttcctagtcaccttctcccaatttaccacccctaggaacccaagctccccatttcttttgtctagtcatgtctccccgagttatcatcctttgctaaaatggtgtattagtcccttttcatgctgctgataaagacatacgctagactgggtaatttataaagaaaaagaaatttcatggactcacagttccatgtggctgaggaggcctcacaatcatggcagaaggtgaaagatatgtcttatatagtggcaggcaaaaagagagagtgagaaccaaacgaaagggtttccccttataaaaccatcagatctcatgagacttatttagtaccatgagaacaatatgggttaaacccatgattcagttatctcccactgggtccctcccacaacatgtgggaattatgggagctacaattcaagatgagacttgggtggggacagagccaaaccatatcacatggtatataagccccagggtctaactacctctctgagttttcagttctcttctatgaagcccctgtggacataaaattaaaaataaactttgtctgcctcttctctgattaatctatcttttttcagtttaactcttaaattccagccacagaaactaagagggtagaggaagtttttcctcccctacatattcattatagtttcatacagaacaatttaaccaccctaaacataccctgtgtacctattcatctttctctccctcccttaaaatctctggcagccactgtctttactgtctctatagttttgccttttccaaaatgtcatatggctggaatcatatagcacgtatcttttttagtctgctgtctttcacttagcgatatgacttaaagtttcatttaaaaaaacgcatgtgatttgtagttaatggaaaggattacataaagcacattttatgtgaagacatgggagttgcttttgatatttttacttccttgattcaatatgagactgattagagggctttctcttccagcactgaccagagggtagaaagaaaaacgcgaggattctggattctctctttataagcacattgtttatggttatagctcatccaggttgagtttagtgcagtggctcctacagctgatccgtgaactagctgcaacctgaaaatacagattccttcatccctgggagtttgtgactctggagcactggagaaagacccaggactgcatttttaatgggcttctcatgtgatacttacttatacagaaccatttctttggtagtaaaaaggaataccggctttggtctcagaggatttggcgtcaagtcctctctcttcattgaagcaccaaatatttatttaactcctcccatgtgccagaccttggaccaggctctggattgatacaacagtgagcttaatagtcatgctttctacccttcacaagcttacactggagaagaggcaggcattaagtacacaattacagaaataaatcttattcatcaactatgctaagtgctaagaaagaaaatacaaaatgctatgagagagtgttaaaaaagggatctggctttgtttgaaatggggtcaatgattcacttttccctgagataatgactttgaactgagatattatttacgtgacatgagggaaagatgtctgccacccgggcacacgaggtccatttggcttggaacacaaggagagacagagatgaggctgcaaattaaccacttgatatctgtccttctgcagatcaacagccagggtcactgggtgtctagctatcctcctactcaactgcactgaaatttctcccaaatctccaaaacatgtttagtaattctgccagttatatttatcaagagcttaaacaatcagattgttaatagccttttcttaaaaagtgttagaattttagttgttagtgaatgattcttaaaaggctgttctgtctttgggttagggccaattgttcatttactgaaagatatacacggaaaagaaaaggatctgattctgcattgccactacttaagcgctgtgaaatgcttgagcttttgtcaggtgtctgtagcctcatttcatcttcactgtagacttgtggaaatgcattattatgacgccaattgtacagatgcagaagtaaaggctgagagaaatgtagaggttcactgcattgacatagtgaggaattgattgcagtggttggctgtcagggaacagtcaatgtccctagctaggacaattttaatactaccattgtgtcagttttgggccccagttatgcattctcttttggaagacatacaacctggacatacttatgtgaaccccgaaaatctgaggcaggtctcagttagtttagaaagtttatttgccaaggttgaggatgcacgcccatgatgcagcctcaggaggtcctgaagacatgtgcccgaggtgatcagagcacagcttggttttatacattttagggagacatgagacatcaatcatcatatgtaaaatgaacattggtttagtctggaaaggagggacaaatcgaagcagggagtgggcttccaggtcgtagataagagacaaatggttgcatttcaagtttgtgattagcctctccaaaggaggccatcagatatgcgtttatctcagtgagcacaggggtgactttgaacagaatgggaggcaggtttgcctttagcagttcccagcttgacttttccctttagcttgatgattttgggggtccaagatattttccttttctttttttttttttttctgagacagagtcttgctctgtcgctcaggctggagtgcagtggtgcaatctcagatcaccgcaacctctacctcccaggttcaagtgattcttctgcgtcagcctcccatgtagctgggattccaggaacgtgccaccatgcctgactaatttttgtatttttagtagagatggcgtttcaccacgttggccaggctggtcttgaactcctgacctcaggtgatccacctgcctcggcctcccaaagtgctgggattacaggcgtgagcctggcctttccttgcacacttaacatcccaggatcttacttaatgctgggaatgaggttctatggaggactcccggtgttttttctcctgctctccaaagccaaccaagatctcttcagaaatcttcagctcagcccaaaggagaaacttccaaggtaaaagaattttcctaaaagtataaatgatattaagaattctgcccatatggactgggattatgctttatttcctgatgggcctttttcaaaataaatcatgttcctactctccatcttagcagatgatgaaggcaattgctgctgaaatggaaccatgtggtaacccctgcattaaagcaagtgtaggtttattacatacattggacacagtaggtgacaatgtagaattatttattttaagggtacaagaccatttaccttccttcctcaatatccttcttataccttattatagtgctgcactttacactgtaagaatcattccttggaatttgtaaggccctgaatataaaaagccactgttaaaatagcatgctacctaagaaaagtaacccattaacatccattaaggcttaagtgttaattataatcatgaagtttgaaagttatggctaaatgatttattattcagaagccaaagccttctagatttgtttgactccaaggatagagtcaaaagttcaaacgattctaataatgcaaaaatatcaagaaattatggaatcttctcattccacccttcctctttatcttaaactgctactatttcaaaatatatgtgttagtcatgccgattactgtgaggttatcaagggtagtcttcaatatagagcctttactttcttttcagagctttatgggagaactggttgtcttctatgttttcccttgagaattttgcttatctgttgtgtctgtcctaaatgctacagtagttggtctcagactgagctgtgtttttgtacactgtcatggacagtagcatttatgaagcattttttgcatacaattcttgtctttgatagtgattatattttgtattttaataaattatcctgggctgggtgtagtgcctcatgcctgtaatcccagtacgttgggaggccaaggaaggtggatcacttgagcccaggagtttgagaccagttgcagaaaccccatctctacaaaaaatacaaaaattagcagggcgtgatggcacatgcctgtagtcctagctactcaggtgggaggatcacctgagcctggggagatcgaggctacagtgagccaaaagcatgttactgcactgcagcctgggcaacagagtgagaccctgactcaaaaaaaaaaaaaaaattaccttgaatttttctttaaaaaataaaacatatttagaactcaggttttctctcgttgaattctaagtcctattactcagctgagtttttttatggccttgttgaattgtcaacagagacagtggattactgattcatcaagtatatattctctgtagcaggaaaatggaataaggaatgtacttgcatttccacattacctgacaccatcattttaactttattcattaactttattttacggtgtgtgagactcaaaacaaaaatctgccattagttccagtttggctccaaaataaaatattactttgttcattcattttcacatgttgtattaaagtgctgtcactgggctgatgctatgatcctcaccggagggaaatggatggagcacattctatggaggacatagagagaaatctggagcataaggaaaagggccaggctacgttgggttggacatctcagttgatgatacagggtatccaagaagctttagtttcccacgtatggttaggatctaggtacctggatattgaagatataggaagtagaacataagaaataatttttccagttcacagctttgttttgagaaaggctctgagcaagtaaaaaggagcaaatgcttatctgagtagaacttcaacggtatggcttgtgatagccagtctcatgcaggtacgtccttgggatttaacatatacaggctgggttcagtttagaggattctctagcaatttgagaagccaggaaaacctctcaaaccccttagacccagacagaaagaatcaatgagggaatgattcactcaatgaataattaccaactggagtgaaggattctctagtctagtgattctcaatgaataagcattataccatctctgtcagaaatgtatgtatgttaaaatgcagattcctgggccctacctcaggctaactggagcaaaatttctatgaagtggggtctaagaatatgcatattcacagatatgctagaaggttcttattcatatttacagcagacacttatccttggggatatgtcaaaccagccaagtgggaatgaaggtaaaactttgagcctacagcacaaatgggctgagatattttgggtagagcttcttcttatggataaaacaatagtcacatgagtagcaaaaggcttcataaaatattttgacctccacaggtgacataactttcttttgttgtcaactcctgatttattttagagaaattttgtttttaaaagttctctctgatagataaatgtgctgaggcactgagtgtacttttagttcttgcattgggatgtaatctaataaaataaaattccatgcagctatttggatgacatctgtttgaatagcatagtggggcaaatagatttgtgtctatgtatattatttgtgtgttgtattattagcaaatatgatagtgttagcaaatatgatagtattatcagcaaatatgatagcaaatatgatatgatagttgtatgattagcaaatatgtatattatttacgtgttgtattattagcaaatatgatagctttaataataatctaatattaatttatactacttaattttgacaaagaagtagaattgaagtagagatttgatattaaaggcatttatccatctgctttggagtggcaattggtatatagacaatgggctttagattcacataaatgttggtctcaccttttccatttgctcattgtgtgaccttggcatattatttagcttctctgaatctgtgtttttttaactacaaaaagaggacaatagtacattacttctatgatatagaaaatcacggccgggtgtggtggctcacgcctgtaatcccagcactttgggaggccgaggcaggcggatcacaaagtcaggagatggagaccaacctggctaacatggtgaaaccccatctctactaaaaatacaaaaaaaattagccaggtgtggtggcgggtgtctgtagtcccagctactcgggaggctgagacaggagaatggcatgaactcaggaggcagagcttgcagtgagctgggtaccacagcgagactccatctcaaaaaaaaaaaaaaaaaaaaaagaaaatcactttaaggctgatatatatggtggctcacacctgtaataccaacattttgggagcctatggcaggaggcttgcttgagcccaggagtctgaggttgcagtgagctgtgatcgtgccactgcagtgcagtctgggtgacacagtgagactccgtctcaaagagaacaaaagaaagagagaaagagagagagaaagaaaggaagaaagaaaagaaagaaagcaaaaagaaaagaaaagaaataaaaaaagaaaaaagaaagaaaaaagaaaagaaagaaaggaaagaaagaaaaaagaaaagaaagaaagtaaaaggaaagagagaaatgaagaaaatcagtttaatatagtacttggaacatatcaaatgcttacaaaatttagtgcccttcattgcactggagaagagttaggtggcattttgtagctccgtatgctcagatacagtttgtttttgagctgggaatattttagacttcatcttttctttcttagtcctataattttcctttattcataatgcagtcatccctttcccacccatggaaacagtgaaatgtgggaccagccatgctatattattaattttgcaaagcttgctgacagtgacctctccagcagtagcattcactcttttgccttaaaaaatttcccacaaaagctctccactaggcataagcattactcttagtcctcccactgcttcagtgtggcacagtcatcagtaatatgtagatttccactttggctagggtctatttctctgctttgctcagaaggtaccactgacctttctgattagctgagttgcagatgactgagcttgcacataaaagggacagtcagaaaataaatcttccctgtgtctgtctagacagactccaagagtcaggaaaaattctgctgaaagtccataaatcttccatctttcttcctgaaagcatgtacgagaacagttctcctgtcactacgtatgagagcattcctgaatgtgtgggtagggtttttgatgtcaattttttttatatcaactggtaaaactttattttacaagcaacaggaattggatcaaatgattattataatccagaggaaatattttggaaccacagcaaatgccattatacatactgccaatacagatttaatagacaatactgaactgtacaagagttatttatttttccttaatctcgaagctatttttagtaatacaaaaaagccatattaacatttttttcccgttagaaaacatgatgtacaaaactttggatgaaaagataagtcaaatttcgtttaatcacttggaggaaaatccaccaactctctcaataccacctttcactcgcgtccgtgtgaagagaccaccaaacaggcgttgtgtgagcaataaagctgtttatttcacctgggtgcaggcgggcgggctgagtccaaaaagagagtcagcgaagggagataggggtggggccgttttataggatttgggtaggtaaaggaaaaaggggggttgttctctggtgggcaggagtgggggtcacaaggtgctcagtgggggagctttttgagccaggatgagccaggagaaggaatttcacaagacaatgtcatcagttaaggcaggaacaggccattttcacttcttttgtggtggaatgtcatcagttaaggcaggaaccggccatctggatgtgtatgtgcaggtcacaggggatatgatggcttagcttgggctcagaggcctgacgttcctgtcttcttatattaataagaagaataaaacaaaatagtgtcgaagtgttggggcggcgaaacatttttggcagggggtggtatggagagagagaatgggtgatgtttctcaggattaggggaggcgtgggaacctggagtgggagagattaagctgaaggaagattttgtggtaaggggtgatattgtggggttattggaagaaacatttgtcatgtagaattattggtgatggcctggatacggttttatatgaattgaaaaactaaatggaataagagaaggagaaaaccaggtattaaagttctaagaatggggaggacctaggacatgtaattagagagtgcttaaggagatttagcatagttctgccagcaaagattatttatttaagagttaagagtggcagtttggggatagcaccaggagatatcagctgtgatagcttggagaaacagtgtaaactggcagtgtaaacaagagcagggcacgtatgagtagttgagaacagtgaacaggagtatgactagacagaagatagtagggatgacaagtttttttggggcacagtcttaagttggtctggtgtctggaataagactggggcctaataaaaaggagcgtccatacaggagcttaaatgtgctgtaccttgtaggattccgaggacaggcctgaattctgagaagggaaagtggtaaaagtactgtccagttctttttaagttggtggctgagcttggtgaggtgtgtttttaaaagactattagtctgttctaccttttctgaagactgaggaccgtaaggggtataaaggtttcactgaataccaagagcctgaaaagccggtctgctattggactgtatagaggtgggaaggccaaagcgaggaattatgtgtgacagaggggaagaaatgactgcggtgaccttttcagaccctgtgggaaaggcctctacctatccagtgaaagtgtctacctagactaagaggtattttagtttcctgactcagggcatgttgagtaaagctactttcccagtcctgggtgggggcaaatccttgagcttgatgtgtagggaagggagggggcctgaataatccctgaggggtagtagaatagcagatggaacactgagaagttatttccttgaggatagatttctacgatggaaaggaaatgagaggttctaagaggcgggctagtggcttatactatagcatagcctgcctttgctggtgtggtgattaggcctggtggaactgccatcaataaactaagtgtgatcagggtgaggaataggaaagaaggaaatatggggaaatggggtggaatgtcaggtgcatcagagagatacagtcataggggtcaggtgtggtatcaggaataatgtgggaggccggattgaagtccggaccaggaacaatggtaattgtgggagactcaacaaagagtgagtacagctgaaggagctggggagcagaaagtatatgcgtcaggtgtgaggaagaaaatagctggggagcagaaagtatatgcgtcaggtgtgaggaagttatgagaactgttgagagtgagttgagcatagtttgtgattttaagggcctctaaaagtattagggcagtggtggccactgcacgcagacttgagggctaggcaaaacagtaaggtcaagttgtttggataaaaaggctacagggtgtagtcctggttcttgtgtaagaattctaactgcacaggcctgcactttggctgtgggtaatgaaaagggttgggatttgtcagggagagctagggtgggggcagtctctaaagctgtcttcaaggaacggaaagaggaatggggaaaggatttaggatctatggggtcagctaggtttctttttgtgagtttatataatggttttgttaggatagcaaaaccaggtatctaaagtcgaaagtgtctaaccatgcccaggaaggaaaggagttgtcgttttatagctgttggggtttgagatatcagctgaacaggatcagcagggagagcacgtgtgtttttatgagaattacgctgagataggtaacagctgaggaagaaatttgggcttgactgaagtaatgggggctgtctgtgaagcttgcagcagtacagcccaggtaatttgctgagcctgatgggtgtcagggtcagtccaagtgaaagcgaagagaggctgggatgaagggtgcaaaggaatagtaaagaaagcatgtttgagatctagaacagaataatgggttgtggagggaggtattgaggataggagagtatatgggtttggcaccatagggtggataggcaaaataatttggttgataaggtgcagatcctgaactaacctgtaaggcttgtctggttctaggacaggtaaaatggaggaattgtaaggagagtttataggctttaaaaggccatgctgtaacaggtgagtgataacaggctttaatccttttaaagcgtgctgtgggatgggatattggtactgagcggggtaagggtgattaggttttaatgagatggtaaggggtggattataggtcgctaaggagggagtagaggtatcttatacttgtgggttaaggtggggagatataaggggaggatgtgaaggaggctttgaactgggggaaaaggtggcaatgaggtgtgtctgtagcccaggaatagtcagggaagcagataatttagttaaaatatctcggcctaataagggaactgggcaggtggggataactaaaaggattgcttaaaagagtattgtctaagttggcaccagagctggggagttttaagaggtttagaaacctggctgtcaatacaacagttatggaggcaagggaaacaggcctttgaaaagaaggtaatgtggagtgggtagcctccgtattgattaagaaggggatggacttaccttccactgtgagagttacctagagcgtctgtgatggtcttgtaggcttctgaggcaatccggcagtatcagtcttcagctgctaagctgagaagatctgggaaggagtcagagagccttgggccagagttccaggggctctggaagtggctgccaggtgagttgaacagtccgattttcagtggggtcctgcacagatgggacacagcttaggaggaatcttgggctgtgggcattccttggcccagtggccagatttccagagcttgtagcaagctcctgggggaggcaggcctggaggaatgcctggccactgaggtttaggcgtttagaagttcttgtgtgctggagatgtggctggggtttgtctcatagtggaggcaaggaattgcaactcagaaatatgttgctacttggctgcctctactctattattgtacaccttgaaggcgaggttaattaagtcctgttgtggagtttgagggccggaatttaatttttggagttttatttaatgtcgggaggagattgggtaataaaatgtatattgagaataagacggccttttgacctttcagggtctagggctgtaaagcatctcagggttgctgccaaacgagccatgaactgggctgggtttttatatttgatgaaaaagagcctaaacgctatctgatttgggataaagaaaaaggagcattaaccttgactatgcctttagctctagccacctttttaagaggaaattgctgggcaggtgggggaaggctagtcacagaatgaaactggaagccagaccaggtgtgaggaggggaggtgataaaaggattatagggtggaggagcagaggctgaggaagaattgggacttagcctggcgaggaggggagaagtcagatgagtctgtagaaaaggactattagaaagactcagtgacacctggggttgggactgaggggacaggcaggagggaaagaaggaagatttgggactagttgcattgggaacagagactaaggagggattgatgtgtaaaagaatggctggacgtcaggcacctcagaccgtttgcctattttatgacaagaattatttagatcttgtaggatggaaaaattgaaagtgccattttctggctatttggaactaccgtcgaatttgtattggggtcaagcagcattgcagaagaaaataagacgcttagattttaggtcaggcgagagttgaagaggttttaagttcttaagaacacagactaagggagaagaaggaggaatggagggtggaatgttgcctatagtgaaggaggcaagtttaaagagaagggtagagacgtggagtaggggatggggagcagccaaagcaggcatccccgcaattgacttgccaccaagggaacgtgggtgaatgaccaaggcaggtgtccctgcggagatcagacaccaatggaatgtgggtgaataatcagagaggcatccttgcaatgattaaacaccaagggaaggctgccttcccgagtccatgaccggcaccggagttttgggtccgtggataaaatgtgtctcctttgtctctaccagaaagtgaaaggaattgaaattaagagaagggagagattgaagtgtggtgccaagattgaaaggagaaagaggttgagagatagtgagggaggttggagaagagagtaaaaagaggctgcttaccggatttgaaattggtgagatgttccttgggctggtgggtctgaggacccgaggtcataggtggatctttttcacggagcaaagagcaggaggacaggggattgatctcccaagggaggtcccccactccgagtcacggcaccaacaccaaatttcactcgtgtccatgtgaagagaccaccaaacaggctttgtgtgagcaataaagctgtttatttcacctgggtgcaggcgggctgagtccgaaaagagagtcagcgaagggagataggagtggggccgttttataggagttgggtaggtaaaggaaaaaggggggttgttctctggtgggcaggagtgggggggtcacaaggtgctcagcaggggagcttttgagccaggatgagccaggagaaggaatttcacaagacaatgtcatcagttaaggcaggaacaagccattttcatttcttttgtggtggaatgtcatcagttaaggcaggaaccagctatctggatgtgtatgtgcaagtcacaggggatatgatggcttagcttaggctcagaggcctgacaccacccaaagtgttttatgcagtgaataaaatcaaaataatgcatcttaataaattccagctgttaaaagaacaaacttagcaatatataacagtttgctacgcaggatttttgactattcactttgggagttattttttaaaatccacttttttttactgagtcttactacatatcaggcactggacttggccatctaggtaactaagaaaaagttggttaagataggaaagacccataaatcaatcctttgattaccaaatgcaatttttaactttcaaacatccccaagatcaagaaaccctaactaaaaatacatacccttctaagtgttatttgattttattagtagcaagggtgtttggtaaggtcgtgaacctctatttttgatccattattccaattaaaagcatgcgtcaaaagctaatttgttatttttctaatgtgtttaagatttggcattcagtttttacacatgtggttcagtgatttatcatgaaccctaaactgcacactgctcaaaaacagcaacacagatgtgcgttacatgaaataatggtttttgatacatatcttcaaattcaattcagtttagggtccagtgaagaaaaagatatccagttatcgggtggtaaagagcagaggaggtaaactagttaagattattaatatgcagtgaagtgttattgtctatcttatcctttgagtaacaagatgctaacacgctttcaagaaaaaactgcttaaaactatgctaaaggcccatgcattgacatcatccattcaacaccgttactttgttacataaaacggttttcttaaggtgtaacatattaggcaataatttggaaattagccaagcactaagcaattataatagcaggtaatacaccatcaatttttgaaacacatttggccacatttcacaatccatctgcagtatggattctatagactctcactcagtttaaaatttgtttctggacctgaatgacaggagaatggctttatgaaattttctcataagacatttaagtagtcttaggttcacaacccttttgttgtaaatgatttaatctgacatgccatataactacaatacaaataattatgttcaattcttaaatgaaaactaaatgccaataaatggtaacagatttgacatggaatgttctaagatcttcctctacataatctgccatggcagattatgaatttcagagcttgaaaacttcagattaagaaccacaagaaaatttactcttgatggcatacaagatcttcctaaaaattaacctaagacctagaagtctcagtattattagaacataaagaaacgcaacaaatctgtatattttattcacatatatttttgtttttagtgtgctcacagaaaattagaacaccttaagtaggagtttaatagcaatttttgtaagcaaagttacattccatctctaagtcaaattggtcgacgcttctccagcatttacaaaacatgatagacaagatgctacacaaaaccattgcatctgaagattttttttttcctttattctcaaagatgactggaaaagaaagcattatctgctgtaatcaaaaacataccacagtataaacagtaaccattccgcttatcacagcttggttgagtttaaaatttgtgtttaaaaggtccaagatgactgcagttttacaaaaatgggcagggtggaaagtcgcaaacttcatgtgcttctggatatcaagatttgtttttatacaatagtcacagttaaaaacaccctgctggtaatacataattacactttattaaggtcataaaccagcaataaacaatacagcctatataacttgtagttctacttaatcactgactggtacacctaacatgagataagtgaaaagttcctatggtttaaatgaactcctaagactatgatcatttttttttttttaaatatgggtattggtgttttttcttttttcctctttccttcttagtcaagacttgtagtgttgtaaacctgcctcacaaaatacatggtaataacttttcttaaaaaaaaagacagcctttacaccatttctagtggcacattattttggcaatgttatgtaccacttccatttccccattgtgacccctatcacttcatttgatatccctttttgacccacccatctctttcatatatgggcatatccatagattgacaaaggaagtttacatttttggataaagatggagagtatgcaaaaacattaatactgatgcaaaaaaataaaaaaatagaaacaaggcagaggaagaaggtgtttaagctctcctcgacctgttggaatggtggttaacagaatgatttgagatgggatctgtggggaggggagaaaaaaaacaaaattttgtgcttaaaaaaagtaaaagattgatgtcaaatatttgtactaagattgcgggtggcaagagttagcatcctgcagttagaagcaaaattagagatttggactggtcaaggacagcattgatatgtgtggggtatgtaaatcacccaagctctgcaaaagtactgagaataacttgtattttccagactgaaaacctaccatgatggggagggattgaagtgggccctggaacaactccggaatacattacaagcttaaggggagagcaaggaatttagaccatagagctcatcattcatcattttattccacataaaatgggtgtttcagcatgtccaaaagcatagataaggaaattgagcttcccaagaagttaagccagttgtttgcagttagagaaagcatgtttttatgaagctgtcctacccaggagcggggaacaggtccctgggctctatgaccatggaaatctctagatgagtaaaagaaagcttggcaaaaattgggcaggatcctcaaacaaagattgagaaaggcttttctcatctgtgaatcagagttctggactttcctgaggatgagaacagctgcatggctgaaatgcagcagcccagagcaaagagggtgctccctggggggtcacagctggtgaagactgaaaatccagatcctaaaattcaaccagacctatcataccagcaggccaccacgaaatgactgcaggtttcactggagagacgaggtacttggcctgcgaattgctttctatgtcctagacaagtaattgcgagtaagccttgagatagcaatttgatagtctttgatagcaatatgacattgctacatccaagtgtgggagtcagtacacttatattgcgcatatcttggacattttaggtttcattttcatttctttttaccgtcaaactgggggaaagattggcccttcatcccagattgtatttatgctcatttttgttttcacccctgcccatgcccacccaaccacactcctgtccatcctctccctcgctactcatatacccctgggaaaagctcactgcatttagatcccaggttcttctcccccaaggcacatcgcttaacattaatgctgggtgctcacttgatggcaataacatttcttttgaaattttcaagaatatgactcttcaagaagcaacaactagaaataattaaaagttcacatgactgtcagagaaaatatagcagaggcagtagcagtcctcgctgagaaacccagggagcaactggttgggctgagaaggttcgtgaggaatctttcatggagaaaattattttgccaacagttccttgattattatttaatcatacagttggctctcttgtgttcctttaagatctgtgagataggtacaaacaagattttatattcaatagcttatacctgtaagcagtacaggcttttaaaagattggacttttaaggcaaaggtaattggtgtgaagtattagccacttaatggaaaatgataaaatggtacatgtttcaatcagaattatgagctgtgctcgacgtggctgtttgtagctgaagttcactgatttctgtacaatgatgaatttctttgtggcagctaaactgctcagcctagagttacacaatcttcaacgatgacgtttccaccctttgcttgggtcattgaatgtctcaggaagaggcatgaagaagaatgaggagctcgacccacctggagatgggtagacatgtttgctgagctatcagtgaattgacgcatccaaggatgcttttctccctacaggaataatctcccgtcatgtctcaaacttctctccatctcactagtgaggatgaatgctgtcttcctctagggtagtggaggacaatcaggtcactgccagaagacagcttttcacactctcgctttcctcgagagaatgttaaactaattggagtgaggcatgaaaggatgaaatttggccaaattggcaggtgtgaacgtcctttcttcacaccaagtagagtcaactggggaaaatgatggtgctgtcctgatgtgagactgtttctcatagcacggtgctggccactgcatgacactctctaccagcagagaagtggagtgctactgtgaaaagaactgacggatatgatttggttctgggaagtgagttttgtaacaccatgctggaaactaactcattagctgtgatcttgcaaaaattctggcattctgagataaagcaatttgatcaccagtatgtcatataaagaggttttggagtagctttaaaagacacagtagatcaatatgaaaatgaaatgtatccatctaataagaatattcctcttggaggagccagtaaaagtgtgtgttcttgtgcctgcctttgtgtgtgcagacacgtgtgcatatgtgtgtatgtgcagcatacatgtgtgtggtataaagaaagaaaaaaatcttgttgcgtaggaagagttgtgtagagcctactaaaaattatatagccaaggcatgtctcttaattttggaactactaggtgttaaaaagcaaaggaaatgaacatcagagcaagtgaaatatgagagccagaaaatatcaatgtgagttttgatatcaatagaccaatgaattgccaatgatgcagaagagctttatgagccttggcaggcaattaggtaagagtagtttcttctggagtggcaatttgaagtggttattaactatatactgaaatttgacgggctaaagaacccagttaaaaagaaaaccatccatatcgaattgttccctctactttgtttaaaaaacaaaaaacttcatgatgagctgaagtaagagatttttataccaaacaaagatgactaaactgaaagtatgaaaccttctatttttagtgaatcctgacattctctactgctagcattcccagcttccagataatatgttctccagttggctggttattgtgctgtaaatcacatttcactatatcagcaaacgatggcatgaacttgaagagcaaaacaaaatcagcttggaaaaactgacataaaacctctaaagtctaaaggtagtcccttcccttagaaaatgactggattgattacaattgcattgtattatcaaatatgtggttttattttaattttgtttactttttatttgtttactttttgagagataggatctcactatgttgcccaggttggtctcaaactcctggcctcaagtgattcacctgcccttatctcccaaagtgctgaggttacaggtgtgagccatggcactatttttaaagattaaaatatatttaaacaattaaattccaagtgaagaaaaacatagataaagtggaaggtgattaaaaaagcaagtgtttgctgcactctgtttgctgttcttttctctgttagttgctgaatcacacttatgataaattacatttacaattcatttgaaaataaagctaaatatcaagttttgggatattagaaagtagaggctacagagaagtattcttatctaaatcaataggaaaagtagaatttttcccattgctatgtgataacatagcttatcactagccaatttctcactatctgcataagattttgccaatggacagaaatctgcttccttactttctgtgtcaatcaaaaatagtatcctgagatattattttgtgtttcacagactagaaatttttagcaacctgaggacatgtgacttgaaaacatgagcagtgccaagaattatattctcttccagttttcatagctaaagggagttagagttgaacaattcccagaacagcacagaaagctagaaaatattaaatttacaggctaaggctttgccattgaaagctgactatggagatttttagggtaggcaggaagaacaacacaatctagaagtttgggatcttgctatatttccccttcactaagacttttctaagtaaatagttaattaatatcccaggatctcaatttccatatctgtaaagtgaaagatttgaatggataaactataaggtctctttcaaataaaaaattttatccttgtatggcactctccataattacacacatgtataatctaaccctatggaactacacattaatttcccaagtgtgatatttatgatctcttctgatggttgcatgccatttgttaacgtgactttgacctttcctggtctgtgtggcagctgagctactactgctatatcctgaaccagggctttggctaagcagggatgtccaagtgcattccttatgacccagagaggctcataattccatacaggaacattcatgggaccttgaagaatttatgtttgtgttggtaaatttctcttcatggcctccttgagagcaatgaaagaagtgtattttctgacagctccaacttcttactgcctgtgtttgctcagcattatttcagtcataggtgtccggaaccccagaaagtgcaaagacatcctcacagctccatgaatatatgaccaatactcttcagaggggactgaagatggattagcactttgtaggtagaggttcaaatcccaattgcaacagcaggctgtgtaaccttgggaaatttgacctctctcctttgtaagtgggcacaatggataacatgagaccatatttgtaaatcacctgatgcggtatggcaggctcaaggagtgttgtctttgcactgcccttccatgctgtgtttatcctgttatgaataaaatgaattcaacctgttagactgtcagcgccttcataactggccttccctttcggcttgaggcatgccatctgccgtattttgcaccaacttcaagaacataatgtacttacaaaatacttgtcagtgtggactctgaatgaatttttatagcattaaaaacaaaaacagacaatcagagcaaggaacaagaacaagccatttacaacagaataaacacaaatggctaatcaatatatgaaaaattggtccaactttatcctcagagatccacaatttaaaaaaataacagcttcgagataatttacataccatatgattcgcctatttaaagtgtatatacttcaatggtttttagtatgttcacagagttgtgcaaccatcatcattaattttaaaacatatttattacccccataaaaactcatactcattagtggtcattccctttttttttttttttttttttgaggcagagtctcgctctgtcgtccaggctggagtggcaccatctacgctcactgcaagctccgcctcccgggttcacgcccttctcctgcctcagcctcccgagtagctgggactacaggcgcccgccaccacgcccggctaattttgtttttttttttatttttagtagagacggggtttcaccgtgttagccaggttggtcttgatctcctgacctcgtgatccacccgccttggcctcccaaagtgctgggattacaggcctgagccaccgcgcccggctgtggtcattccctttttatcccttaatcctttccttccccttaggtaaccactatctactttctgtctatagattttcctgttctggacatttcatgtacacagaatcctacaatatgttgtcttttgtgattagctagttttgcttagcaaattgtttccaaagtttatccatattctagcacattcactttatgcctttttaaaaaatttggaatttgtttttttattttttaaattcatataagatatatctaacataaaatttgctactttaaccactttaaaatatgcagttcagtggcattaattatgctcataatgtcatgcaaccttcgcggctatttccaaaacgttttcatcaccccaaacagaaactacaaccattaagcaataactttccattcctccttcttcccaggggttgataacctctaatgtcctttctctctctatgtatttgcctgtcttagatatttcatataagtggaatcatacaatatttatccttttgtatctgttttatttcacttagcgtaatgttcaagtttcgaccatgttgtagcatgtatcagaacttcatttcttatgaataaatataccatattttgtttattcatctgttgatgaacacttgggttgttcctaccttttggctactgtaaataatgctgcaatgaacatgggagtgcagatataccttcaccatattgatttcaatttcctctggatatatacccagaagtgggattgatggatcatattgtagttctatttttagttttttgaagaaccttcatattattttttatagtggctgtactaatttatattaccaccaacagtgtataagggttcccttcactttgtatccttgccaacactcatctttcatctttttgatagaagccattctaacagatgcaaggtgatatttcattgtgattttaactagcatttccttaatgatcagtgatgcttagcattttttcatgtatctattggtcatttgtatgtcttttttttttttttttagaagtgtctgttcaagtcctttgtccatttttaaatcaggttgttttcctttcattgaggtgtttgagttccctatatattttaggtattaactccttatcagagatatggcttgcaaatattttctcccattctgcaagatctacggcttcaatgcaatcccattaaaattctttcattttctgcagaaatagaaaaaacaatctttaaatttgtatggaaccacagaagactccaaatagccaaagcaatcttgagcaaaaagagcaaagctggaggcatcacacttcctgatttcaaaatattttaaagtgattttaatcaatagatagtactggcataaaaacagacaccagtgaaataggatagaaaacccagaagtaaacccacatactcacaattgattttcaacaacagtgtcaaaacataacattgggaaagggcagtttcttcaataaatattattgggaaaactggttaaccacaggcagaagaatgaaattggatctgtatttcacactgtttacaaaaattgactcagaataattaaagagttaaatataaaatctgtctttttgattaaagccatcctagtgagtgttaagtagtatctcattgtggtctgatttgcatttccctgatggctaatgatgttgaatatcttttcatgtgtttattggccatttgtatattcttaaactgttagtggaagtgcaaattaactttaaaaagccactcactttggaggacagtttggcaatttcattcattttgagccaacaaacccatttgtgggaatttaccttaagaagataattacagaactatgaaatgatgtgtgctcaagttattgcagccttcttttacaataaagaatcggaaacatactctgtagaagttttaaaaaatagtaattttctgatatacacaaaatgatgtactatgcagccattaaaatgatggtatggaaataagtacttcacacgtaaaatacctataatatacaagtcaaggattccttatccaaaatgcatgggatcagaagtgttttggatttggaattttttaagattttggaatatttgcatatacataatgagacttcttagggatggtacccaagttcaagcatgacatttatttatgtatcatatataccttatatccatagcctgaagttaatcttatacaactttttctttcttttttttttttgaaacggagtctcgctctgtcacccaggctggagttcagtgctgcattaagctcactgcaacctccgcttcccaggttcaaaactctcctgcctcagattcctgagtagctgggattacaggtgcacgccaccaggcccagctaatttttgtatttttagtagacatggagtttcaccatgttggccatgctggtcttgaactcctgacctcaagtgatccacccaccttggcctcccaaagtgctgggattacaggcgtgagccatggcgcctggcctatacaatattttaaataactttgtgaatgaaacaaagtttatgcacatttagccatcaaaaagcaaaggtgtcactatctcagccacccacgtggacaacctgtggttgtttggcatcaccatcatgcctgactgaatttatatgccaccaatgaacaattattttcttactcttatttatacatgagtctctaatagtaaagacaatgacataccatcaatacagtgaaaaaatactgtgttcagcatagctaagcagaacagtagcatcaccagaatatctgtatcagctgttaaacaatagcagcaatgaacaacgacaggctttcagtccccacttgtgacctgttacgtcaggtcagatgtggaattgcccgcttgtgacatcatgtagttgctcaaaacgttttgaattttggagcattttggatttcagattttcagtttaaggatgctcagcctgttctgttgaataaatagtgtgtcacagagtagcatgccattttaccttttgtcttttaccactttcgtgaaaacgttcgccttcttctctttgtatttgtgtacataaggagatgtacagcggatgactggtaaaagtgaacagtgtttacctctaggtgctggaatttgggatagcattttgtttttcctttgagattttctctgctgttagaactaaagtaattcagcctatatcaaaacaacaataataaagttactttcaaaggaagaataattttgctctgaactgtgcctaccactatctccccttactattgaggaccacaccattttgaccctgaatttctactttcaaaccacaagagaatcccaataaactatagtaacatggagaactggtgtaagaaaaacacaggagcttgttttcattgaatttccttgcaataattacacgagtttaattaaaacaaataaattagaattgatacactggaatcaatatgcaaaaaacaaaatgtgcttgttttacgggtcctaataggattccaagcaggaaccattttctagcatttatttctagcacatctatctttgaatggaaatttgtgggagatgatgagagaaatctaaacatttcccattttggtgcttatcatcagcccagaaggtttagttcatccagtcttgttcagaattgttcatgctctgtcatgcctgtgctcattgatgtggttggctccgtgtccccacctaaatctcatctccagttgcaattcccatgtgtcaggggatggggcctcgtgggaggtgattgaatcgtgggggtggacttcccccttgctgttcttgtgagagtgcgtgagttctcatgagatctggttgtttgaaagtatgtggcactcctccccttgctctctctctcttgctgtcagaggtgattgaaccagaacaactccattttgagtaggggctgggtaaagtaaggctgagacctactgggctgcattctcagacagctggttaagctttctaagtcacaggatgagatgggcggttggcacaagatacaagtcataaagtccttgctgataaaacagattgcagtaaagaagctggccaaaacccaccataacaaagaaggccacatgagtgacctctggtcattctcactactcattatatgctaattataatgcattagcaagccaagagacgttcccaccagcaccatgagagtttacaaatgccatggcaatgtcaggaagctaccttatatggtctaaaaaggggaggagtactcagttctaggaattgcccatccctttcccagaaaactcatgaataattcaccccttgtttagcatataatcaagaaataatcataaaaatgggcaaccagcagccctggagtaaccattcttttattacttgacattcttagtgaacttgctctcactttactctatggattcaccttgaatattttcttgcccaaatccaagagccctctcttggggtctggatctggacccctttccagtaacactgccaccacatgaagaaggtgcttgcttccccttcgccttccatcatgattttaagtttcctgaggcctcccagtcatgcttcccattaaacctgcagaactatgagtcaaacctcttttcttcataaatttttatagcagtgtgaaaacaaactaatatacccaggctgttccacatctggctaaaaagaccctctgcaccttgaattgctagacaaatcccattgttctaccaagactggctttgattcacatctatgctcccaatactgtgtaaaaactgcctggagatctgtttcttgcttatctatcttcacatctccagagctctgtgcctggaatactgtgagcactgtgcctggaatattggcagcactcaataaatgtttgttgagtaaatgcatgcatgtgtgcatgcaggcagtggtcagattgtaaaaggctttataagccttttacatgctaaaagggaatgctaaagaaagggaaatcaggccaggtgcggtggctcacacctgtaatcccagcactttgggaggccgaggcaggtggatggcctgaggtcaggaattcaagaccagcctggccaacatagtgaaaccccatctctactaaaaatacaaaagattagctgggtgtggtggtaggtacctgtaatcccagctactagggaggctgaggcaggagaatctcttgaaccttgaaggcggaggttgcagtgagccaagatcgtgccattgcactccagcttgggcaacaagagtgaaactccatctcagaaaacaagaagcggaaatcagagtcagtcacaggagtagggtcctatgttgccttagaggtagtgtggctgctttcttgatgtcctctccttactcgtacctgcccagtcttgtagctttcagtatgatccacaaattcaacacacacatacccccaccacgcccaacatacacacatatacatacataaatacacaaacaacagaaaagaaaatgtcaccacatatttcacatgaccttagttctttgtttaaatgaaaaaaaatctcataattttttctcactgaaaaatgaatatatagtcaatgtacactagactatagaaaaaagtacaaagaagaaacatcacttgatatcccattatctacagatgaatggttagagttttgctgtcttttctatataggcatatatatttacatatatatgcatatatttaagtggctgataagacaaaaaataaaacaattaaaggagatgttcttttttcttgggaatatcagttgaacagactgtacattttgtcttttgtaaatttaaggctagctagaaactcttacacttgggaaaaagaagtattcacagatctttgtgtttttgtgtggcttttactccccttttactaatagaattttttttttttaaatcaagagtaaacatgaatgaagggttatagattttggaaagacataacagaaagcagctgcctcatgcaccctctctcttcacttctaatcctgttcaccaaagctaaggacattcaaccatttgcactttttttcatatgtatctccttatttttaaaggacatgcctatattgctattctggatttttcatttttagtagttatctattcttaccatggaagatgaagatttcattctcttacatgccccctccccactcttccaacccatgttccttccttatgctccaaatactgttcatcatcatttttgttcagagtagactgttgaagacattgtttcaataatcttctcattttatttacagttaagctatgtgtcatttaatttttcttgtagaacattttgtttttcctggagtttataattgtgttattttttagtttgtttgtaagtatgtttatttagatactgagaaaaaaatttactcgaattttaccagtgccaatacctggtttagggtagaatatttttgaaaatgacctacaattcctagtaaattgcttgagcaattttctggtagaatttaacaagatgaagagcccactttagaggttggatttatctgcccagctaactgtcgtcagccttatgatgagcttcataaactttagccagactttattatacctagtctaacaaagtcacctagccagctttctttctctttaaatgtctctaccagagaaatcttgactggctttatcagaagcctttgctcttgcagcaagtttgacataaaatattgacactaaccagtaaccaattcgcttggaaagttccttcagctatgttcatcattaattcttccacttagtttccccaagaagtggaaatggcctcccaataccttaaaacacattgggtaatctctacatttcattctttccttgaagacatccttcttggagcatgctattttctggctgcattgtaggttgatgagtctctagacttgctgcacagagatcgtcatggggacttcttttgccatcttcctgggaattccctttcccctctcctagattggatgaagagttggtctcatgggggtctgtgaccgttgcaatcgcacttaccagggctctgcatttggcttagcactctgctgttgccattttgaaattcttaatagctgggcacggtggctcacacctgtaatcccagcactttgggaggccaaggctggcagatcacttgaggccaagagtttgaaaccatcctggccaacatggtgaaaccccatctctactaacaaaacaaaaattagccaggtgtggtggcaacgcacctgtaatcccagctactccagagactgaggcactagaatctcttgaatccaggaggcggaggttgcggtgagctgagatcgtgccactgcactctaggcctgggcgacagagcaagactttgtctcaaaaaaaaaaaaaaaaaaaaagaaattcttaataagttctgaacaaggggccctgtgttttcattttgcactgggtcccgcaaattatatagttgctccttattggactcccaggtttctgtcttttggtttttttttggcaactctctctttttgggggagcacctactctagcagcttcctaagtaatgctgtataagagataagagtttttgaaattttgcatgtctgaaaaaaaatctttatcttaccctcatattcttttttttttttttttttttactttaagttctgggatacatgtgctgaacgtgcaggtttgttacatgggtatacatgtgccacggtggtttgctgcacccatcaactcatcatccaggctttaagccccatatgcattaagtatttgtcctaatgctctccctcccctgtccctaccccctgacaggcccctgtgtgtgatgttcccctccctgtgcccatgtgttctcattgttcaactcccacctatgagtgagaacatgtagtgtttggctttctgttcctgtgttagtttgctgaggatgatatcttacccttatgttctaataatagtatggttcagtatagaattcccaggtggaaattattttccttgagggtttgtttttgtttttgtttttttttgagacaaagtctcatactgttgcccaggctggagtgcagtggagtgatctcggctcactgcaacctccgcatcccaggtttccttgagggtttgaaggcattgcttcattgtcttctgatgtccagtgcttctgttaagaaaacagatgccctttgattcccgacctgtggatacgatctgtattttctctcagttgcagctttgccatctactttctggcaatcaagcttgattgctgttgtcttgtctcatctccttgtttttgcaggtgattatttaaaagtcaccattttagcagtattttgagagagagcagatgtaaacacacattttcaatccgagccacttttaaatgtctgtgttgcttataaagtcagctctttctcttcgtatgtagaatcaggtggtaatggtggggataatttgcataagaagccttagtgccttctggaagacacgaatctttcttttcaaaatttggtggcacatgcttgtaatcccagctacttgggaggctgaggcaggagcattgcttgaacccgggagatggaggttgcagtgagccaagatggtgccgctgcactttaacctgagccacagagcaacactctatctcaaaaaaaaaaaaaagagagaaaattcaatgttaaggaaacctttgctcctgatgagaaagaacacgaaaaactgcagggaaaaattcactattagaaggaagtagactgtattggtaacctagttgtgcctgctggatcaaagtttggctacatgagattgaacaaaagaaccatctccttgttacccaaggagatgtatcatgccaaatctattgtttttgttttgttttcttcaaattattttttccttaataacctggcagtgattcaaaatatgaaaagaagattcagatgtgttctctttaagggggattcgaccatgactgccttacataagcaggatcaaagtccatcatgggactggattccagagaacaatgatggtaagaaggcttcagggctcacagtttgaagagtgttgttacagaaattctctgaggggtagcaggtgcagaagagtcataaaatttaagggaccaaccatggataggctgttgccaggtcatgagcaccttgaagcatctcttgatggccattcattagcctaagtatttgttgtctgggagaactgagcaagatgagctgcacagttcagttgtccatagggtcatgtttcttcagcacagagacctggtctccctgatcattgtgggttatggaaaaacgtgaccacacttaaggcagaagtttcaattccctctgcaatttttcctgcagcactacctgcctaaacacttcacatatatgtcaattcccttccagattctctattgttgaacacgaatgtgtgtggttttaaactattatgaataatgccatcaatatcccaaatcacatatttttgcatattcttcattttttccccatgcacattttacatattgtgttttgccagcatacctccagaaaagttgcttcttcctcagacttagtgtaattttacttaattttttttaaaacacagcaaatataacaaatggaagaaatgacagggtcatttcagcctctttttatttgaatatctgtatttcttaaggttcattttcatctttgatagaattggaatgcatttacaacatgattataatatctgattattaataaatcagaaataaggatgtattttttgttatcactgagatttcaccttcatgtagctctgtacccacttctaagtatattttacaagcatttctctaagaattccaaccatgtgaaagtactctggcaataaaattttaaaagcctctgtttgcactttgtactttttaaaggtaagagaaatttgaggcacaggtgggcagccgagcccttgagagaaagcaacaatagcaccaggtttatcaccgttcaggtaaatgttagaatgtggaatgcttttattatccctgacatagagatccttccagtgtatttagactgaggggtagttttattgtgccaactgtcaaaaggtattgacttcaatgtatgtgggaaaagattggactccagaggcaccgtgattttccttgctctcctggatggtgctgcacagcccacgggggctctggcggctgcatacatgtgcagtaagtgcacctgaaaagaatacatgtgctcaggtgtgtattctgccatccaaatttgctgtacaagctcccttgaagttgactattgatttgctgccaaatgcaagggcaagagacttaatgaacagttggcaacatttatgccaaattatctttaatttttttaagggactatatctttttcaagtagtctggcagtgaacttcagcttcactcattctctcaccctcctcaatatccagttagttatttggcctggcaattcaacttccaaaaatccctctcaattcagtatctcctttccatcctgagctaccgctgctcatgttctagctcatgaatttaatcccaacactaatgaggctccctgcttactggatcttcctttcttaataactcatcactctaaatccattaggtcattgttcttaagaatcttaatggagaaaatattcacaagaggttaacgtaatgcaaaagatggtgaaacgctctggaataaggatggaagcttaatgggaaacaaataccccatcctatttttgcatgtcctctgatctcctgctggggccacccactgccaaaaacaaccaaaagttagagggcaagcaaaagagcatgggtgataccatctatctacaacagttagcttcttagggtacagactaggtggagagataccatggtggggaaaacgacatgtggacgccattcagcacagttactttttctgactctcccaagaagaacgcattttcccctcattgatattccaagagaaatatcattttattggtacctcaactgaggcacctgtgatactatatttgtaaattatttccatgtttagaccttagctccttcagttaagaactatatcttaattatgttcatatctttagcagttagcactatcttgcagacagtggtgcccaatatatgtttgctaaataaaagaacaaatgatggcatagttgtcctggtgtctttaaagaaaataatggctataaagaaatcctttacacctgtaatcccagcactttggcaggccaaggtgggtggatcatgaggtcaagagatgaaggccatcctggccaacatggtgaaaccccatctctactaaaaatacaaaaattagccaggcgtggtggcgggtgcctgtagtcccagctactcaggaggctgaggcaggagaattgcttgaacccgggaggtggaggaggcagtgagctgagatcacgccagtgcattccagcctggggacagagcgagactctgtctcaaaaaaaaaaaaaaaaaaaaaatcaggttagctggagtcagggattaggtaatacggaatgcagaaatagtgttttcttacttagatcatgagcataaaagcactttgtgagatataatgctattcaaatattactagcatcatttccattattctggattgaacataagaaggaacaaaagagaaacaacaaatagcagtcaatagggagaatgttaaatcctttggtaatacctattacatggagaaagttaaaacagacaaacaaaggtccttattcagctaggaatggtggccagatcagggtcattgaagtctagtttcttttctaaccctgacttgctttgcagtatttggtaaatcacttaacctttctgcggtacagtttttccaatccgttaagtgtctattatagtactttctccttactctcgtgcaaggatgtttgggtgattcatttgataatcctgtaaagtactttgagtcccatagagaaagccagggacacaagattttaactgggattattagttagaaagtctttttgccttggttgaatctccgtttttcatttgtagctcacctgcttttctgtggctttcccagttccatccttgttcctgtacacaactgtgagggtgtaatgataaccaattatatatcccaaatgatggggctatcattagattaactagttgggtagatgtagaaaaattagaaaagtgagaagattttcagcttgtctgcagatgactaaggaaaacacttagagtgggtgcagtggagaaagattattagccagtgactgaaatcaattaggaacctaaccaaaatgttgttatgttcgttggcacttgaccatgacctttttgccttcctaaggaaaaataataactggctccaggtttaaagaagcttcatagtttacattgcttgatacattaaattttgaatacgttttgatattggtccagttttacaatttccttcgaatgacagaacctttacggaggacaatattagcacctctttatggagcaactgaaaaactgcaataatatctccaccatatacttttggaggattgagaaaatgtgtcatcgcttggaattcctaatcttattttattcattcaggttgaggaataatgtaagatattgctccactgtggctttatgaaattttttacttaaaaaaatccaaagcatgtaagtatttatctcatggcttaaatgttcatcactgtaaggagaagtttaagattggaatgtatctctagccttgctctctctccccctgagatctggctttatactttacagcagtaggtttgcaaatcaaaatgccagcttgacctagctgccagaaagtcctgaatatgaatcccacaacagaatttattaattttcctttacaagttggtaatttcttattttctcttaagtaatgctaatttcgggtacacccttgccatgagggaggttctaggtctccagtgttattgtcatacactggcatgtatactgtcatctctactggtattatataatgttgttgctggtacaggctttccccagaatttatagagatggagacaacacgaactaggcatcatcagtcacagcaactcagtttatagttattgaaggaattgttgaaggaactcctgagtcagtctgtaagtgaaatcacagacatgtaaaataaacacttacattttagattatatgatgatgctaaattttctttaagacattggagaattaatgtgggggcaaagaacagggcatgacaggagaaagggccaactgggtccctctccatttacaatgagtattatctattttatatttaatttttatcttttctatgaggcatagttttattaatttcagttatacaccataggcaaaaaaatgttcccagttagagatcctgccaagcatctctaatcaatgttgaagccctggtggaattaagttggttgctttgctttttaatttttttaaaaaaataaatagggtatatgggcttgttgtaaaataattcaaacagcaaaattgcaaagtagatgtcatctgatgtcatagctgttcttcccctagccatgcagtttcactgcttttgaaactccagcccccttttcctaggctagctctgttgggagcctttcagaaatcttttctctgtatacacacacgcatgtgtatgttatgtacatatgtatcaatcatgtctttatttatatcgctgctttatttcagtcaggctgctataacaaaatgccacagattgtagcttaaacaatagaaatggatttctcacagttctggaggctggggagtccaagatcaaggtgctggcagatttggtgtctgctgagggcctgcttccttcatagatatctgttttcttgctgtgtccacacatggtggcaggaagggcaaaaaggctctctgaggtctattttatcagggtgttaatcccacgtgctttgccctcatcacttaaacacctcccaaagctccacctcttaatatcatgattttgggagttaggtttcaacgtatgaatttgggaggacataaacattcagaccatagcaatcacattatacatattgcatgtcaaaccttatatatataagatatatctttttaatttgacaaaaaaggatcactttccaggtactattctgtaatctaccttttgtgctttattatacatcgtcatcatatttctgcttcagtgtgataaatctattgtatttaccctaatggctacaaagtattgtcctgagagatatcctaatttatttttttaaatgattcccaattgactggccttaagttgcttctattttcatagaagcaataattatcataatgctacaataaacattattgtacatataacatttttgcatttggggagagtatgtatattgcaggagaaattcttagaaatggaatttctgggcatatgaattttcaaaaatattgccaaattaaaaaggactgcatatatttactctcccactagcactgtgggaaagccttttttttttttttttttttttttttttgagacagagtttcactctgtcacccagactggagtgcagtagtgccatgtcggcttactgcaacctccgcctcctaggctcaagcgattcttctgcctcagcctccggagtagctgggattacaggtgcaccactactacccagctaatttttgtatttttagtagagatggggtttcaccatgttggcgaggctggtcttgaactcctgacctcaagtgatccacctgcctcggccttccaaagtgctgggattataggcgtgagccactgcactgtgcccggaaaatcttttttattcatgtctttactaccattggtcagctaagccagaagacagatgacagagggctggtctatttttgaatattgacagagaagaatgagactctgggctgggcgcggtggcccatgcttgtaatcccagcactttgggagcccaaggtgggcagatcacctgaggccaggagttcgagagcagcctggccaacatggtgaaatcccatctctactaaaaatacaaaaattagctgggtgtggtgatgtgcacctgtagtcccagctactcaggaggctgaggcaggaaaatcgcttgaaccctggaggcagaggttgtagtgagctgagatcatgccgctgcactccagcctgggcaacagagtgagactcggtctcaaaaaaaaaaaaaaaaaatgagactgatcaatgttgctttgacttcaatttactactaaaacagctagcaagaaagggaaagggtactcgctagaccagtgggtctcaacacctggagcagcagcagtagcaccacctgaaacttactagaaatgcaagttctcaagtcccatcttaaatctgaatcagaaactctggtggcagggcccaggaatctgggtttaacaagatcttgagctgattttgatggtggcccaagttggagaattactgcagtacagcttgatgaaagtgagaatgcagtttcccagtgctttccttatgcctcttggaggtgaacctggagtcctctgctttaggttgaaggtacccagggctttgtactccctgcatctcaccccactggggtggagcaggggacccactgggattcagtgtattacttactttcatataaggcaactcttgttgtcccatagttataaagctctgtgttctgtttcttattgtattacgtgtacgtggacatgccaaacattaacaaatatttggcttcttgtctatctgaaaaatggcccctcatttctatttaacatgaatttctttaattataagtgaagttgagcatcttcttatttttatgggccactttgcacgttttcctcttatttattactttctatatttgtcatattttctattggttggttgtctttttaaaaaagaattaaattgtaacagctgttttaattctaaggaaattagcctttcatcatttgtgttgcaaattcgtttttacctactttgtcatctatcatttaaatttagttacaatacatttttgcatcacagagagttaagatttttatgtagtcaaattgataagtttttatgtgtctgaattttgaattttatgtatgcttagatagatcttcccaaccctaggataattaaaaaaacatattttttcctaaactttatggctttatttttagcatatacatctttgatgtgaatggaatttattgtgacttaacaactgaagtatacatattaacttccatttccaatggaatatcattgattgagattataattaacttatagctcaataaaaaaagagttttaacccagagttttcctaaccaagaacagagtatacctttacagttacttattttttcatttttttttccttcgggagtgatttaaaggttctttatatagttattacatatgtattttataaacttttggaatgtgatgtttcttattataagtaacctttctactaattatttgcatataataaagctcaattttttttgtgtattgatttcataatcaccttactgaattctcatattatttttattagtatagtttttagaggattcttaggagttttccaaggcgatgtggtttggatctctgtccccacccaaatctcatgtttaattgtaatttccaactgttcattgcttgtaatccccagtgctggaggtgggcctggtgggaggtgatattggatcatgggggctgatttcctccttgatgctgcttgatcatgagtgagtgctcatgagatctggttgtttaaaagtgtataatgcctcccctctctctctcttcctcctgcttcagccgtatgagcataactgcttcagctttgccttttgccatgagtaaaagctctctgaggtctctccagctatgcttcctttaaaacctgcagaactgtaagctaattcaacctcttttcttcataaattacccagtctctggcatttctttatagcaatgggagaagagactaatacacaaggttgtaataattatctatgaataatataaagcagcctgtttttgaaattagacttctgttatggagtgaatattatggtggaatatgacctttctaaaatttttctgttcttaaaaacatcatcttgggctgggtggtggctcatgcctgtaatcccggcactttgggaggcctaggcgggtggatcacaaggtcaagagaccgagaccatcctggctaacacggtgaaaccctgtctctattaaaatacaaaaaaattagctgggcatggtggtgggcacctgtagtcccagctactctggaggctgaggcaggagaacggcgtgaagcttgcagtgagccgagattgcgccactgcaccccagcctgggtgacagagtgagactccgtctcaaaaaaaaaacaaaaccatatcatctttaatgaagtaaatgtcatacaacaaaattgaccaattttacatttgtaattctgttttaatcatgtagtacagctgtataattaccacaatcatcatataaaacatatcaatcctgccagaaaattctctcctactcctttcctgtcaattgcttctccctatctcttgttcctggtaccactaaataacttttggtcattgtagttttaccctatctagaattttatataaatagactcatacggtgtgcagtcttttgtgtctcacttttttcacataatatatcatgatatggctatacaataatttgtttatattcactagttgatgaacatttgggttgtttacaactttttggctattaatgaataaagaggctattcatgtacattcaagtacatgtcttgtctgggtgtgtgttattatttctcttgggtaaatacttaggagtgagcctgctgagttgtatggtaagagtatatttaacttgggccgggtgtggtggctcacgcctgtaattccagcactttgggaggccgaggcgggtggatcacgaggtcaagagatcgataccatcctggccaacatggtaaaaccccatctctactaaaaacacaaaaattagctgggcatggtggcgtgcgcctgtagtcccagctactcaggaggctgaggcaggagaatagcttgaacctgggaggcggaggttgctgtgagctccattgtgccactgcactccagcctggtgacagagcaagactccatctcaaaaaaaaaaaaaaaaaaaagtatatttaacttaataagaaactgacaaacactttgtatgactctaccattttgtattgccatcagcattatatgagtattccagttgcttcacattttcaccagcattttgtattgctatctgctgaatgtgtccccaaaagtcacgtgttggaaactgaatgcccagtgcaatagtattgggaggtatggtctttgagaggtgactgagtcatgaggactcttctttcaagaatggattaggtctcttataaacagggcttacagaagtgggttcattctccttcattcttctaccatgtgaggacacagtgttccttctctctggaggatacaacattcaaggtaccaccttgaaagcaaagaccagactcttactagacaaggaacctgccagcaccttagtcttgaacttcccagttcccagaactgtgagaaaataaatttctgttattcatacatcaccgtttcaggtatttttattatagcaacacaaaaccaagatgggtattgtcttttaaaaaaaattctagtgagtgttttgtagtatctcagtgtgtttttaattttcattaccttaatgaccgatgttgctgagcatctttgcatgtacttacttatcatttatagatattatttgatgaagtgtttgcttgaatttttttgtctaatttttattggtttgtcttactgagttgtaaaaattctttatatattcttgaagcagatcctttatcagctatatgttttgcaaatgttttctcccagtctctgtgacttgcctttttattttttaaatgatactttttgaaaagcaagcttttaaatattttgaaatccagttcgtaaatttgttgcttttatagtttatgctttttaaagaaattgagtgtaacccaaggtaacaaaaatttctcctgtgttttattccagaaattttagttttaacccttacagttaggtctgtgttcctttctgagttaaattttggatatagtgtgaagatgaggattaaagttctctctcttcttttggtatataaatatccaatttcccagcactatttgttgaaaatggtatcctttccagagtgaaatacactggcacctttgttgggaatcaatgagccatataagtgtaggtctatttctagattcactattctgttccattgattcacacgtcaataccagatgtcttgattacttgagcattataataagtctaggtgtaagttttatagtaagcctgagtgtaagacttctgactttatttttctttttcaaaagactttcaactttactttttcttttattttggctatgctagttggttttcatttctatgtaagttttagaattttcttgtaatttctgtggaaaacactgctgggattttggaattctgttgaatctatagatcagtttggggagaattgatattttaataattttgaatcttttgatttatgaccacaatatatattttcattatccagatgtctttaatttctttcagtaatgtttagtaattttctgtctacatgttttacaaatattttgttaaatttattcctctgtttttcatatttttactatatttttatgatatttgtttaaaatttccaactgttcactgcttatatatgaaaatgctactgatatgttgactttgaatcttgtgaccttgcagttagttctagtagatgttttgaagatttcttagaattttctacatagacaataatgtctgtgaataaagatagttttatttatttatttatttatttatttttaaaattttttggaggccttgtggatttgaagagttttttttctttccagtcttatacctttttagtttttttaaaatttttcctgccttatattgtattgataagaacgttcatacaatgttgaataggagtgatgagagagaccatccttgccttgttcctgaccttagagtaaaagcattcagtgttttgcccttaagcaggatactgtttttagttttctcatacttttttttttgaaatggagtctcgctctgtcacccaggctggagtgtagtggcatgatctccactcactgcaacatctgcctccccagttcaagcgattcccctgcctcagcctcccgagtagctgggaccacaggcgcccgccactatgccaggctaatttttgtattttttattagagacggggttttgccgtcttggccaggctggtctcgaacacctgaccttgtgatctgcccatctcggcctcccaaagtgctgggattacaggcatgagccactgcacccggcccctatagatgccttttattggattgaagagcttttattttattcctagtttgctgcaaatttttttttttattattacaaatgggtgttgaattttgtgaaaacttttttctgcatccattgagatgatcatatggtaagttccattttagacaattgatatgatgactcattgtttttctaaggttaaactaacttcacattactaggataaaccacactggattatgatgtattattcttttaatatatttcaactgactgaagtattgttaacatttttatatctatgtttataagggatattagtctttagttttctttcttataatttcattacctttggataagttaaaaacatttcagtcgtattttagtttttccactcattacatttaagactttaaataaacatacactttaaactctatttctatatatatcaactttaaataatatattctggagttttaattttaggtaggatggagtaagcacactcctccatctctgagtgcacactcctccatctcttagtacacactgaatacagctaactcattaaatatagctttaaaacctgggtataatgcgtataacagtgatataaggacactggaaagtaaacagtagcaagaagattgggaagaagaccagaatttaaagttttatgaaatgccagttagtttatctttttttttttttttgtaccactatcccttggcatggattcaaggtagtctgaaactcaaaacctgtacatagacatggcatggataaggaacaaattacagacagagctccagaagaggccctatagttttgacttaagcagtatgaagcagggctgggggtgggaggcatcacttaatctccagagacagtgagggcaatccatcatttttattttctttttctctatgtttccttgtaccatagtccccaggcaatgctgtggcaatgacagcagtggcctactggacctgcaaggggctaaaagtctgagctgggggggtcccttcctcttcatttggagaagactgatctcaacagagtgatatgaacactcattgattttttttccctctttttatcctcccaccaagtggcctcatatgtaggacaattgttggaagagcatggtagagcaggataattgaagccccagctctttgtccagaggactgaaagggtagccccaggaaactgaagagtatcagcaagatgtggtgagaaaggacctcagggaaatgactccctgaaagtagcttatgaactctcaggcttgctccttagatacccacttacagatctgattctaaacaacatatcaacgactttgaggtctgagctaaggaatagatcatcacttaatttccatattggccaccgggtgacataaacaggagacagatcagaatagcactacaaatgctttgagggaagaaaacaaacccaaaccgatattgaaactacaacccaggaaaagtcagttggaatttgtggcctgaatctaactgggtcagctgctgaaacaaaacaaaaatatcagcattctccatgggatttaaataagacccagagtcttatattattcaaatgtctgtgatatgatctaaagtaacttggcatcttaagaataagaagaatctcaactcttatgggaaaagatagtcaacagaagccaacgcggagatgacacacaggttaaaattttctgacaaggtctttaaaagaagaaagggtgaatacatttgaaatgagttgaatgaaagataattttagcaaataaatagaagacttaaagaacatccaaatagaaattttaaactgaaaaacataacaatcaaaataaaaacctctccagatggtttcaatagcagaatggagatggcagtggaaagggtgaattctaagaaaaatagaaattatacaactgagagaaaaaagatgaaaaagaaaacaaacagagacttagggatctatggaactctaccacaatgtctaatacttctgtcatcagagtcacagagggaggagaaatattgttgtatagaaaaaatatttgaagaaaaatgtttataagtcctcaaattgggcagaatttctatgtagctcctatagattcatggaacgcagggaaacccagacaagataatcctaaagaaacatgtttaggcatatcaaaagcaaactgttaaaaattaaagacaaagaaaaaaaagcttgcaggcagctagagaagcacaactcattacttataactgaactatgattctaatgactacacatctctcatagaaaccatgactgtcagaagaaagtgaagcaatatttttaatgtgctgagagaaaaaagtgtcaacctagaactctatatacactgaaaatatccttcagaaatgaaggtaaaatagagaccacagatgaaaaaaaactagaaaataattcattgccagtagacctgctctgaaagaattgctaaagtaggtttttcagacagaagaaaaaatgataccagaaggaaacttggaacattaggaataaataatatcttttaactctgatatgaatggttaggaaattggcacatacatcctcctttctgatatctttttttttttctgccagtgtccattttttcttagctatactcttatttatacatttcaatgtctataaatttgcacaattgtcaagccttacttctatgttttaatcaattcagtgcaaacaatacttttatgccatgaattcttcctttctcaagttcttttgatgacagcacttgtttggtgagaatttgttatcaagaggttttatatcccttaagaaggtctgtctataatcttttgactcacaattttggatactaaatgttggtatgaagaaatctgaggtcactctgattttcctcccatgcaaatgaattgctttttctgagtgaatgctcattcagcttttatttttattcttaaaggtaaacagcatcaccagaatatatcaagttgattactggaatgaattactttttcctggaacatgatgaatccttttcatcctcagacccagatgttcctttatttcagaaacattttcttctatttaatttttaaatattattttctgattgatttgcttgactcccagggttagtcaagtttatgccaactttatttggtctctcttacatatctatcttttaaattacttttgcttctttgttttttgcatttaagttttcagattttttttttcttcttttctgagacggagtctcgctctgtcgctcaggctggagtgcagtggcgcgatctcagctcactgcaagctccgcctcccgggttcacgccattctcctgcctcagcctcccgagcagctgggactacaggcgcccgccaccacgcctggctaattttgtttttgtattgttagtagagacggggtttcaccgtgttagccaggatggtctggatctcctgacctcatgatctgcccgcctcgacctcccaaagtgctgggattacaggcgtgagccatcgcgcctggcagttttcagatttttatcagcctttcttctatgctcccgattcttttataaattgtattacattgtttttgtgtctctatattgcgtttatgtctatggtatttgtattattaacttttgtttcttttgtgaactctggtagcttggtttcactatctttatttcctctttaatttcatatcccttctcagaaagtctccttttcagatcgtttttttccctctttagtttcttgagcgtgtagactattatttgtttactttttttttcatttcctgtggtaattcttctgatacatattctttttaagtgtttttcttctatatttataacaattgtacaggtggtaaattatacatgccatagtactatagccaggtctgctccttggaaagtctttatgtaatatggaaagaaaatctggaggtgggagaattagaaatctgacatcagtagcaggaagattggatctagatgatggggagacacagggtggttacttcattgtgtaaggcagagattggggctgggatgtgacactctgagttggtaggaaaaagagcctgagtgtaaagagaagaacaaggctgatctgagtagcaagaccctctaccctaccttactggaataagctcatccatgcacagaaagctgtaggaaactgtgcacactgctatcaagtatagttttgaatggccaaattatttatttgatgttagttaagcaaacagtttttaccaccgtgaaaactttttctgcctctatcatttctgctggtctccatatagtcccattaaaaaaaaaatcaagcaataaaaaatatacatactaaaagtgaaagctgatcttaaacttcctcccagtccttcacctccttcctaagaagtaactactatttaacaattagctgtgctgtgtctacatcttgaccttttcctgcgtatgcttatacataagaattttctgtctttactaatatatcttttcaatctttctatgccagtaaatatttttctactacaaaaatcatttgtatagtattatatactattattgtatactatatattgtactatatattgtatactatatattgtgtagtattatatacctattatttatttaactatctgctgttcttggtcacacatttaccctaaaatgcagcagtgaacagtcctctatgtggatattatgagagtttctgtagcatataatcctagaagtggattttgtgggtataagaatatggacagataaaattttgataagtactgagaaataatacttcaaaaagcctgttccaatttactgtctcattaatgagtctattttcccacatctttatcaaaagaatattattctgatttttttatttttgcccattagataagttaagaattgtgactcattacttataaaatttgcatactaccaactgcagtggaatttcagcatattttaaaaatactctttgacccatttcttttgtaaatttctgtctatttttagtagcttttttcagttctttttggtttctagaggtcctttatattggttattaattgcttctctgttgaagatgttggaaatattttctcagtctctcatttttgaatttatttataatctttctattattcaaactatttgaacctttatatagccaaatattttaactttatggcttttatatctttgcttataagaatgttctctaaggttaagatgaagtttgcctatatatttttttctgatatgtatgtagttattaatgcttttaatgttttattgagcttagtttttaatctgtctgtaaataattagcctcttattttgacactgcttattgaattgttggttctttttcctctaatttgaaatatcacctgctttatctttccatattgatttatgtatctactctgggaccagtgccacactgttgttggtatttagaatggtcaggcaagttcttcctcattattcctctcttcaaaattgtgctggctatttcgtttcaagccatctgtttagagttttgattggaaatggtatcaaatttatacataaattcgaagagaactgatgaaacgggaaagttcccttattctcctcacagggcgtgtgacaggggcatgactggtttcttcagtgccccactgcccaaagccctagagggaacatgcagacagtcaggtcggggggcgtctagggttgagtgtttacagctctcaaagccccagtgggcatgtgttacagtgcactctttcagttttgccatccacaggtggcttgtattaatcagctcaattacagcctctgccttattgcaaggacagagggctttctgtatcccggggttcttgccctagagtactggaaaaatcggatcacatgtgggcttggaggatgggtgcaaggttttattgagtggaggtagctctcagtgaggtggatggggagggcaaaagggggatggagtgggaaggttgtcttcccctggaattggggtgcccaatggctggacttccctccgactgaatttcccatattgtctgcgtcattctgctgttgatggcctgctggcatctgctggtgtgttcttctgccagtgtgttcctctcaacatccagacacttgtgtgtgcgcccgctagggtctcagagattttatgggcacaggatggaggatgtgatgggccagagtggtcttggaaaatgcaacatttgggtgcagaaacaggagtgcctgtccttacttaggtccctgggcacaggcctgagagtgaagccctcaccagggaccctgcccttctctatccagcatttccctatctccctcctgtatcactgatatcttttactattgagtcttcacatccagaaacataatttggccttctgttaatttagagcttcttttattttcttctgtaaaaatttacagcattctttatattatatgtttcttattgaatttaattatgaacaggttatactttgttattatcatgggatcttttaaatacattctaattggttatgacaggtttaaaaagctactcttaatttttctgtgttgatcttgtatcccaactaaatcctgtgtttgttctaaatgcttactagtagtgcctcttaggtgttctaggtggctactcatagcgtctgataacaataatagtttgtctttttctttcctatatttacaccaatttttttctcctaacatttaaaggttttttttttttttcagtttcctgtaatgattatttattgaatttggaagatctccattgtggtgttaatttcttaaaagcttagtgtttcttgcttgctcttatttgttgctgaggacttagattaaacagtttattgcttttgaagtatattttgtcagtccagttgagggactgagtctcagtccagatgagggactgccagtttgtctagcagttgatacaaactaattacctctggtaactttgcaggagctgaaaacagaagtgtgactagtaaggtgtgaaggtggcttgatttctagatatgaggctcttggtgcttgttggctgacagacactctccctttctttagttcagcagccactctggtagtcttaaacgtcagagtttttaagaggggtattcatagcccaaatctagggataaatgtaggagatggaggaaaggggagttgccgttttattggtgccactgtttagttaaaatacctaaaacattttctcattcccctttttcctgcctccactgcctttggatgtagatttattctggagttctgttgggaaaacacactattttggaatgttttacttgtctactgagagggttcttcggctattttggactatgttgtcaatctatttgctattgctgtgtcacttctagaaactcctcattgtcctggactactggcaaagcttgttttcaatgctgttatgaatttgctaatttatttcctttgtatctattgtatttatgcacagactttatgttagatccttttggttgattgttatccttaattagggataatgccatctggacctgttaatttgctcaagaactgagtggagaggggtggatggaggatgacacattactcactatttaacaaaataaaggtttttttccataataaagcttgttatataacaggtaaaaaatacagaaaaacaagaggaagaaaatgatcattcataattcagtcatgacaatcactgctaatatttagatatgttagcagtgatatcatattatatatatatattagatatattaaaggactatcagtcctctcctgatgcatatttaacattcttgtgattatattctgtgcagcattttgtatttattttttccagttaacattttaacacatttcctgtatcattaggaacactcatgattaaatccttactttaataatatcataagatagagtaaaatggatcctccaagggtgatacttacttgtctttggccatttgggttaatttggtatttagttcttttaagaaggaaattcgatttttatacatttattattaaattttttgaaataaaatctacagtgaaatgtatagagcctaagtgtctaatttgatgttttgataatgcttacatttaagtaatcatgaccccaatcggatacagcatatttacctgactcactttttaatttaatttaatttaatttttgagacagggcctcactctgtcgcccaggctgaagtgtactggcacaatcatagctcactgcagttttaacctcctgggcttgagggatcctcctgcttcagcctcctgagtagctgggactacaggggtacaccatgtctggctaatttttttttcattttttgtggagacagggtctcactatattgcccaggctggcctcaagtgatcctcctgcctcagcctcccaaagccctgggattacagtcatgagccaccatacctggccaactcattttaataatgtctaatgatgaacacctataagaaggtttttcatatttatgtacttggactgtgattctaaaagtgaaataacttggctttattttacaaaccttttagtggactttactaaaatcgcttccagaagtttgtatcaatttacattcccaccagtaagtggagagtgtcaatctttttttctgtgatccccctaacattttttgactatcccccagcagataagctgcacagtttcttgttgaaagcaagttatgactctttctgttaatatctacttccactcaatcatggttgtgtgtgtgtgtgtgtgtgtacgtgtaaaccatcactgttcatgcattcagtggtgttgtaacatttctcccacaagcaaccttcattggcattatttatttatgacagtgtcttcctcatgaaatcatgtctcagtagctcttctctgtcttctttcaaagactgtggtatttctagtcacacaggctctaaaattcatgagtcccaattaatgtctcttttgctccaatttattccaactcttgttcattctgttttcctggctcacagctcttcctactctgtctttccattttcattctcattgccttattttagccctttatgacctcttacttaaaaaatttctatagcttatacctacactttctccctacgcaaatctgtctgacccatgattgctagattaatcactccagagaatttgtgcttaaatattgttactcaaaatactttagtctccactcaaaatccttctcctggggatgtcagcaacatggcagaacaggagactcctgactattccatctctcacagacatacaagtaaacacctacacatgaattagttctctccaagaggaagctagaatccagttgaaagtctcccacacactggaagactgagaaaatacccacatccaaacaggtaggaaaagcagagacacacttgcactaatcctaccatgagcacaacgccttataattaggaaggaaactccaactcccagcttcttccagaaggttgggagtcttgtaccacatgtatagtgcccaacttttacagttcctgtgggagggctttgatcttaagttaccatgcttgaagaacagtagggacagtgcattggaggatttctctcaagcacaatggacaaaggggcttttgaaccatgtgaggactcccagctactctagcccccagggatcagcccaacttctaacttccccctaaagagggttcagcctaagacttttcaaggaactccctgtggctctggcttctaacaagctggtatctgggagtctaataaggagcctataaggattaaacttctttgagtctaaatcagaaagaaggcactccctgtgccttctccccttgctgtctcctgatataaattcctgcaatctctcattagaaagagaagggtgtacctctccatgtctgaaaggaaaagggggcactctctattcctctaccctggcttgctttcacgataagatcacacaaggctccccctacaaggagggtgtgaaacttctgcttgcttgaataggagagtgggcatcacttgcactttcttccttggcttgttccagtgacgatttcagccctacaatatctccatggaaagaagtttgatgcctccaccagcaagaatgaaagggatggcactcctcatgctctttttctcagtttgctcaggagataaactcctgaaatatctcattggaaggagatagagggacctctccatgactgaaaaggaaagtgagaagtccctgacccttctgctctggcttgtttcagcaataactccagaccagaagcctgtccctactagaagagtgagagacttttgcttgcatgaacaggaaagtgggcgttctctgaaatatcttctctggcttgctccatcagtaaatacagatctgcaggtcctggaagtagtttctgcaagcaccaaggactccatcttttacagtttccaacaaggtactggcttctaaattacctagatcttggagttaatggagctctacattcctgagtttcctaagttacagagaacataaagatgacttttaaacatgcaaattttcagcaaatatttccacaggtccaaagtgagaagtctgatcaagaatacaagtatctctctcagtcactcaccttgtgtacagcagaacaagtgtgagataaactctggctgtcaacttctctgcaaagaaagaaggaactggaacatatcttacacctcaacctcttcagctgcattctaaggaactgacttctatcccacttctctcaaggcaatagcatgacttgacactctctaatttctttggggacactaagaacaaagacatcaggttagatgagtacaaggagtttggaagcaccaggaatctctggctgggctgatgggggagaaacatcttttacatgggaccagtctaacaaaattgagagagatggttcttttatctaatgcatggaaacaaacatgagagccaaggaaaaatgaagaaacgtggaaatgtgttctaaatataagatacatctctggaagccaaccccaatgaagtggagatatgtgatttacatgacagggaattcaaaaggacagtcataaagatacttactgagacaaggagagcaatgcaagaacaaactgagaactttaaaaaaagatagaaaatataaaaatagcagcaaacaaaaataattgagctgaagaatacaataatggggctcaaaaatttaatagagggtttcaataccaatctatataaagcagaagaaagaattagcaaacttgatgacaagtcattagaagtcatccaatctaagaagtcaaaagaaaaaagaatgaaaaagggtgaagacagtgtaggggatttgtgggacaccattaagtggaataatatatacattatcagtgtaccagaaggagaaaagaaacagaaagggacagaaaacattcaaggaaataatggcagaaaatttcctaagtctggaaaagaaaatagaaatccatatccatgaagctcaatggtctgttataggataaattcaaagggacacacaccaagacacattacaatcaaattgtcaaaagttaaagacaaagagaatattgaaagcagtaagggaggagtgacttgttacatacatgggacctctagaagactgtcaatggattttccacagaaatcctgaagggtagaagggaaagggatgatatattcaaaactgaaataaaaaaaagaaccctgccaaccaagaatactatacccagcaatcctgtcccttaaaggtgaagaagagataaaaactttctgagacaaacaaaaggtgagggaatttatcaccattagacctaccttacaagaatgctaacaatagtccctcaagcttaaggaaaaattgttaagtagcaacatcaaagtatattaaaacataaaacttactggtaaaagtaagtatgtagttaaactcagaacactcttagattggaacagtggtgtgaaaataaattttgtttctagcatgaaaattaaaagacaaaactataaaaacaactgtagttacactaacttgttaagggacacaaactaaaaattacaaaacatgtcaaaaaaacaaatggagaggaataaaagtatagagtttgtgcaagtgatcaaagttaaatcattatcagcttaacaagggatgttcttagcatatgatgttttatataatcctcatagtggccaaaaaaaaaaaaaaaacaactccttagtggatacaccaaagataaaaagaaaggattcaaagcatactgtgataggaaatcatcaagccacaaaagacaaccataagagaggaagagaggaacaagtaatctacaaattaaccagaaaacaattaacaaaatggcaatagtaagtctttatctatcaataattactttaaatgtaaatgaactaagttattcaatcaaaatacatcaagtggctaaatggattaaccaaaaaaaagactcagtgatatgctgccaacaagagactcatttcatctctaagaacatacatagaccaaaaatgaagggatggaaaaagttattccatggaaatagaaatcaaaatagagcagggatagctatacttatatcacacaaaatagaccttaagtcaaaaactataaaaagaggtgaagaaggtcattatatgacgataaagtggtcaattcatcaagaagatatgacagttgtagatatgcatccatccaaagttggaacacctaaattggtaaagcagatattaatagatccaaggaatgagatagactgtaatataataatagtaggataactaaatactacacttttaacattggacagatcatctagacagaaaatattggacttgaagtatgctttatttatttatttattttgagacagggtctcactcttttgcccaagctggaatgtagtggcaagaccatggcttactgcaacctctacctcccctggctcaagtgatacccccacctcagcttcttgagtggctggaactacaggcatgcaccaccattcccagctaatttttgtatttttttgtggagacagggttttgccatgttttccagtctggcctcaaactcttgggcttcagcaattcacctggcttggccttccaaagtgctgggattacaaatgtgaggcactgcacctgccctgaactacgcttcagatcaaataaacctaacagacatttatagaacattccattcaacagcaagagaatataaattcttctcaagtgcatctggaacattctccaggatatatcatatgataggctgaaaacaagtcttaacacatttaaaatgattgaaataatattgagtattttttctgaccacaatggcataaaactagaaatccataacaagaggaaccttgaaaaattcccaaatatatgagaattaaacagcctgtttctgaataactgatgggtcaaaggggaaattaaaagagaaattaaaaaatatcttaagacaaatgaaaatggtaacacaacatatcaaaatttatggaatgcagcaaaagcagtcctgtgagggaattttatgacaatacatgcctacatcaaaaaaggaaaaagatttcaaataaacattggtagaaacgggatatccacatgcagaagaaggaaattggatcattttcttacaccatatacaaaataaactcaaaatgagtaaaagatttaaatgttaaggcctgaaactgtgaagttgcttggagaaaatgggaaaagctccatgttgttgatctgggcaatgatttcttggacagaactccaaaaaccacaggcaacaaaagcaaaaatagacaattgggattgcattaaattaaaaagcacagcaaaggaaacaattaacagagtaaagacacacccatgaattggcagaaaatatttgcaaaaacttagacatctgatgagggcctgatatccaaaatatatgaggaactcaaaccactcaatagtaaaaaatcaaactgattaaaaactgagcaaaagatctgaatagacattcctcaaaagagatataaatggccaacagatatatgaaaaaaagttcataatatctaattatcagggaaatgcaaattaaaaccacaatgagatatgacctcacagctgttagaatggctattattaaaaaataggaatgataaagttttgatgaggaggtggagaaaagggaactgtttattggtatgtaaattagtatagctattttggaaaagagtatgggagttcctcaaaaaacgaaaaataggattgccatatgatccagcaatctcacttctaagtatacatccccagaactgaaactgatatgtcaaagaaatatttgcactcccctgttcattgcagcataattcactatagtcaaggcatgcaaaactcacaaaagccaaggtatagaacaaatgaatggtttaaaaatgtggtaaatatacacaatagaatactatttagccttaaataagaaggaaattttgccatttgcagcaacatggatacagccagaggacagtgaatgaaattatccaggcacagaaagacaaatgctgcctgatttctttcatatgtggaagctaaaaaagtcgaccttacagaactagagagtagaaaggtggttaccagaacctggagggatggggaaaggaaagatgtcgatcaaagtgtccacggtttcagttagactggagaaataaattttagtgttctattgcactttatggtgaccacactaaaaaaaaatgtactgtatatttcaagtttgttaaaataatagatctttaacattctcaccacaaaaaattagtgagttgatgaatatgttacttagcttggttgaaacttgaatgtatacatcaaaacaaaagagcatattctataaatatagatgatgattatttgtcagtttttaaaaattgaatcttggcatttagggccctccatagtcttccatttttattcctctttatctctttgatcatatctatattctagccagagagaacacttgttttaatcatatttgacacaattctctattgttctctgctttagtcaagtttttgccttttctggagtactttttgctcctccatgatttaatttttcaaattttaccttttctcaaaattcagtatagatgtcatttctttcacaaaattttccctgttaagcccagaaaaataatctcttttccctctgaatcattagggtactttattcatttttgttttgagtgttattttcttaccaagaaaatattatttctttcagtattatgttgaattatgattcattcactgtctaaacctccttattgagtggaaatttctatgagggcaagttacaggtttaaaattatttatttatttttttcaatatcttgcacacagcagaaaattggcaaataaatgtttattgtctgagtcgtactggggagaggaatggaatttggagcaaaggacataacttatttgaatatattggaaaacataccaatctagcatttgttctttaaaaaaatgagttcacaagtgagatatggagcaagatttttagaggttcaaggactgacacatttctgtgggatattctggtttgacttccaaatcacctctgggtcaagacactggaggtgttttagagcttaaaatagaaactcggagctcagtgaaaaaatatatgatcgattattgctgcaaatgtatagaaaatggaattagcacatgcccgtagtatttcaaccatgcttaaagacagtctttctgttgccttaaccccttttgaccacagatggccgtattaagaaaatatttattaaaaatcacagaggtctattcttcatctgctaaactggtagattttaaggatatggtcccttctccatggtgctttaatatttgctaaatgtgtatgtgcacacatgtgtgtgtgcacttcacatcttatccgggcatattggaaaccttgtaatatagtttttgtttatttttaaccttcctctctactgccttccactaccaccatttaaatacacaaaactgtcactgtgtgagatatggccattatgttgctagctcttctgtgatgtttataaaatatgtcaactccctatagtgaattggcattgttttgctctcccacttcctatcaacgaaaaaaagcaaatgcccccaagtaaataatctaactcattaaccctcactgcattacagagatggaaaaatttatcaataataagagctgagcatcaggggaagatgctttatcttaccccaaacctggagactcatcccggggggcaccaggtctctgcagtagctcccatctccttgcccatactcttactctccacctgcaccattcatctgaataaattagcctcactgagaggaagatgacagcaaagagcgcacctgcaatgtagtgtgactgccgcagcttagtaaggggtttccagggaagcggtttctaaaacacaggggaggagaattgtcagggtttggctccttgtgaaatttgcctgtcagaacagatgatgcgtttgggcataacacactccagtttgttcttctggcagtttctcttctcaatttcaaggctttcacagttttgctgcaacttatccttttaaggggctcttcttctcccatttctccattgactgttggtccagagaggtgagagattatgttgaaattgtctgcttaggactgatttgctgtagaatcaggccaatcacaacaacgggcccctccagcatctgccctcactgcccttgttttcagggcaccatccccccatcctccggtttgtctggaattggagggggtctgggggactgatgttccacaagccatgatcagactagttcagagggcagtgggctttttctggaaatgacatggggaaggatgtgaattttggaggtgcagggagagcaaggaaacgtaatacagatgtgatcatggtgtactgtttgtgggagctgtcttgtctcttaaaatcttgggggatgtttcagtttggaataataggtgagtagttaaggctagaatatgaagtattcatccagaagtgttcattggcaaatgttatactaacttgtgtcacacaggtatggtgtttctgcccattgaacctcaccacaatgttaaggaagtaaatcttattatcctcattctattaatattgcagttgaagcacagagaagtcacatgggtggtaagagttggcactggggccgggcgcagtgtctctctcctgtgataccagcactttgggaggcagaggcaggcggatcatgaggtcaagacatcaagaccatcctggccaacatgttgaaaccccgtctctactaaaagtacaaaaattacctgggcatggtggcatgtgcctgtagtcccagctacttgggaggctgaggcaggagaatcacttcaacctgggaggcgggggttgcagtgagccaagattgcaccactgcactctagcctagcctggagacagagagagactcaatctcaaaagaaaaaaaaaaagagttggcattgtaatgaaatctggagctctgagcctggtctatagatttttctagtatctaatctcccaagagggtaaaattccatttctaaagtatctggccttgctttctttaaataatggataataaggatgtggggggtggacctctgcgaaggaagaatttaaatatccagagggagagaatgcctctttagatttgtggtctccgtgataagtagagctgctcttttaattttatttcaaagttaaatgatagtagtgagtggaataaaggcaccaatctaagaactgttttccaattctctgctttcagctctaaaacaaagagaatttatcatttgccttcatatactgtgctgtgtaggtacccagagacagcaaaattccaattaaaagagtattgattgctcataaattaatgccatccattcagaatcgatggtcacttaatgtctttcaatgatttttattgtgagtcagctcagcccttgtactttgcttattaaatgttccagtataatcgtacgcctatttaacatgggtgattcttttgctattaacatatggttttcgattttcatccagttagcactattagtcattccacatgaaagtcagtgcaatctaacaaactcgaacaacttccctcacctactctcagagataatttatgtatccctcattcctctgagcccaaagcaggtaaacatttccaattaaactgaagagagtaatagaagctctccagaatagtaaaaaaaaaaaaaaaaaaaaatccacaaaaaaaccccaaacaaacaaacaaccttccaccctaccccccgcaaaaaaaaaaacaaaaaaacccaagaacaaaaaacaaacaaaccctcctaggaaactaaagcataaaaatgtcatgggaagttataactggatccgtaggggatataatttcattgcctgtaagcaaaatcgtgatctaatggttttcggagacatggggtactggacatctgtgaggggcctgtggaatcccccagagcattgtgctaattaagtaggaaagggaagcacgttgggaagccaccagatgtcaggctgaagtctggcagtaaagggagctggctaagctcaaggaacatacatttcaggagacagatgtgatcactgtatgaggcttgggtgaaatttatcttccagttcaatggctggaccaggacgtgaggtaacctgtggccaatcaggatatccttgtgactaatgttaatccttcagactcctcagatttcatcccacttctttgcattggtgtcacagctagagtccatgaaggataagcaaccgagcagcttctgcctacttttgcacttctattctgaagagagctgttcatttatttagccagtatctacttttggcattaggagcttttgagtgaggttgagggagtggaaaagagggcagaaatccaggagaggagcgcatcaaatgggaacattcctcagggaccaggctcctcgcgttctgatcctaggtctctcacacattggttgcaggtcatttaatttctctctgtttgtttgcttatctataaagaaattgtaccaaataacacatcccttccagagctaaaatttgttctactacagggtctagaatagcatcctccaactgttttgctcatgtacttgctaaaagaattttttaaaagggtgtgtacccccacattttaaagatgacatgccataaatttaattagttacaaaagatgtagtttccagcatattgtctattgcataagggttttaaatacatgtttttcaaaactgtgaatttagctcattccgcttatgatacatgtcaccacatcacctaattaacaaagccagttcttattgtcagatcattcagccaaataagacttgttttctgtcagaaaaagtctgactttattttgtaatttaaataaatacatcaacatgcaccctgctgacaatcatctcattttggaactccaattctaggatgaataactaattagatacttcgaaaactagtaagccagctagctaaagcagggatccttgccatgagttggccagccctttaatgtttcttaatgtgtccttaaagtactggtccttaagagcaatgtagtctccaattgtccctttgtttagtggctctgaggtttgtaaacaatgggacaagtcactgtgtcagtttcagattgaatgagagatatgcttttcttttggaaagtgggagaagggtcattatgagatgggaggtgggaaaaggagaactagcagcctgtagatacgttattaggcaaatttattttagaaacaatgcctatggaagttgagaatctggaaaagaatctgcttaaaatcaccatgatatgtatcccctggggagttttcatgtacccctgccaaggagtacacagcccggaagcacaaagaattggtagggggtaggatactctccactgtcatttcatgccaagcatttcaataaggccggaatggcaaggactgtcttttgttagggctggcagcccccacacatgatgcatactcccctttgaaatgaattggccatcaagcaactttctatgattgaattcccaggtctgtcgttagggtattgccactttatcacctaatatttactgagaatctaacttgtaggtgcttctgggaacataaaatataatttatgcaatttatgaagattcaaattttccagaagtcaggatgcctagaggcaaatacagtagtgattaaaagcaatgactctggaataatttgtcctaggttggaattcggtctctgcaattttgcttgtgttacggggatagcctctgttttctcatctgtttaaatagaagaaataatacctcttttacagtgtttaatgttttctccatttctcctcactccttcgtccatgtttcaccttctctgcaatgattcatccttgtagaccacatcactagagttcccttgccagttaattggcttccaatatttgctaaaaagtggtaccaggggagattggagggtgaggagagaggtgagatatcttttctaggccctctttgggccatacatgacaccatggctggatcccttcaaaactacagacaacttttgctgatggtcttgccttcatatttcaaatctaactctacctcacaggcttctcataatttctagtctctgaccataccatcagaatatatttactgtgatgtttcaaagtttttcttcaaaggaacttccctctcctttactcagtgggttctggatgtgagacgaggcttatatttggaaactgggcaggggatacccagttcatactggggtggctgctttacctttctgatcaccctgattataacagttaagcactagtctcatttgctgcccacttattttgcctctaggaactctgtcttctaccgaccacgtccttattctatcctctgccctctgttatgttggctctggcatttctacttcacttagtgtgtgacctgttgctttgcctaagcttccaagggccatcctagcagtgtatgagcattgtttcccagggtctttgccagagtgtcaaatctgtattctgagagagagcttctgtgctaataaactctccctcatccaactttacaattccctcctctcccctttgtctagcactctctcaggattcatttttggggtcataatctccaagtaccagctagtctccatcaaccagagtctgtagcacctttggtgctttcacttttccctcgaattggtccttaatcactcttagccagtcattatctcttttaatgaatcaatggcactcaacagccacccaattccatccttatatttgcctttcccctcaaatatctcaaaagccagacatactgtaccagttagtgctcctccttccactggcatcacatcccagtgtacaaccagtgaaaggcttaataattgcaccactgaagcatgcctggtgctatctatactctacctgccactagtggtggggcctctttgtcagccagctggcaggtgatgcagctccaaaatccaaatttagagtcttcttcctgggatagctcccggtatcaactcacttagattgggttctttggaaagagattctgagatgaggagctacaggtagaagtagaaagtttattggaggccaggcacggtggctcacgcctgtaatcccagcactttgggaggccgaggcgggtggatcacaaggtcaggagatggagaccatcctggctaacatggtaaaaccccgtctctactaaaaatacaaaaaattagccggatgtggtggcgggcgcctgtagtcctagctactcgggaggctgaggcaggagaatggtgtgaacccgggaggctgagcttgcagtgagccgagattgtgccactgcactcactccagtctgggtgacagaccgagactccgtctcaaaaaaaaaaaaaaaagaaagtttattggaaaagtgttcttgggagatacactggtaagaaagtcagggtggcaagattgggaagaccaagaagctgacctccatccaattcaattgcaagtgcggcttcagctgatcccaaggagccctctagagctgagatggtcctttaagttctctcaaatggaagcaaggcggatagacatttatatccctacagcagctagccattagctgtgggaccattctctgcagaaggaagtgtaaccttgggcaggagttctctgtggcagagccaattcccagtgtgggatgcagctgtgaaccctcagcaattgggaactgggtgcatccaccctcaaaagagaatctggacagagtacaacagcactacagccacattgcagtccaactctcagccccactgagaatgcaaaagatgaacaagaatgtcttttaaacacattttcttcttttgcttgtcaattttcagttcgtagcctagatatttccagtgtagcaacaaagacatttcaacagtggtcacagcaatggtaaaattggacacaaataaaaatggaaagttttgacagttttagctgcatttagttaaatattgtgtttatgctcattatttggcatagctcctgttgttcttgagagtatttcagaatatgcttatttaattttctttctttgccatttttactttattttttccaccacatttacttttctgcagttaactgacaataaaaacagaagtggaggagctcagaagtctaccccaaatgggccgggcgtggtggctcacgcctgtgatcccagcactttgggaggccgaggcgggtggatcacgaggtcaggagatcgagaccatcctggctaacacagtgaaaccccgtctctactaaaaatacaaaaaattagccgggcgaggtggcgggcacctgtagtcccagctacgcgggaggctgaggcaggagaatggcgtgaacccgggaggtggatcttgcagtgagccgagatggtgccactgcgctccagcctgggcgacagcaagactccttctcaaaaaaaaaaaaaaaaaaaaaaaaagtctaccccaaatgttccccaagcatgcattagtgacttcaaataccatcacttccgtattacattttgtctcccttatattcctaatgaggcttacctgcttttggttcttaggaaaaggtctgggtggaaaatatcagctattcttgccctagagagtcttgaagcaaacactaacatccactgtcaagcaaatgaaaagtctaaaagataggacagagaagctgttaagctttaccccaactgaaagtttgagttgaactaacttggacttgttctgctgactggctgtgcagttttggtgatattttattagtttttccttccttcaaaattatgcaaaggtcatggtccatcatgaagttttatttttaatgttctatttctttttgttgttatcaatcaaagaacattattgcctgaaatagttttcccattagattaggatgttaattggttgacagaaataattgcttaaaatgaaagaacctcctcttgctgctcaaagccgaggagcctgatactgtttgtgatacaggccattggtaaatactgttgacttgtgacctgtggttccccattcacttgttcttttttggaaggaacaagatgctcttcctgcctggggctttgctctgctcagctatgccaccctctgaaacatgtgatctgcattccaaatgcttcactgacaggttctctatcacccagcacaggtagatcactgtcattggcatctatgtgagtgatgagttctgtttcatcataaataacctgaatattcatgtcctagactattggtgacactggaaccttcctattcatgaatacaatactaagaacattgcatatacctattttgctatagtgagaaaagccctcaaatctcactctcaatattatagtaccctcccacccctccacccacaattttcaatgtttgattactctataaaaggtagataattatctgaatttataaacaacataaataattctcaaacatttcacacagcaactacagcatgagggttgagtcaatcagtcttaacagacactcttaaattcatctccagagcatttagcgagactgagaaagaagaaaaattctccgcattctaacattttcgtcctaggtgagaatatttgcagtcagaagctttaaaattgctgacagtggccaccacatgtctcctgggaatgtccacattctctctgcacaggggtgcctacttttttattttttatttttgagacagagtctccttctgtcgcccaggctggagtgcagtggcatgatctcagctcactggaagctccgcctcccaagttcacaccattctcctgcctcagcctccggagtagctgggactacaggcgcccgccaccatgcccggctaatttttttgtattttttttttttttttttttttttagtagagacgggatttcaccgtattagccaggatggtctccatcttctgacctcgtgatccacccacctcggcctcccaaagtgctgggatcacaggcgtgagcccttgtgcccggccaggggtgcctactttttatagagagatatataggggctaggccacagttgcacaatcccatttaaccagaactctcagagccagagaatatagacagccctgaaacatgagaaggattgagcataagcaatatttcagaagctgtttaaacatgtcattatctggcttttctatttcagtaatttgtaagcaagctgcctcctctataaacacatcagcaggaaaggagaaagccatgttagttattgcatctctactgcctgggacttggggagacaacatcaattttaatgcattgaaatgcagaagtatctttgagggaatcccatttggattggatctctttgagggaatcccttatttggaataagaccactggaaaagtctgggctactttaaggaaagtggagagatgttcattttataagactgaacttgcacatatttccatgagtgaataaagcaaatattaactaatggttttttttttttttttttgagacggagtctcgctctttcgcccaggccagagtgcagtggcgtgatctcagctcactgcaagctccgcctcccgggttcacgccattctcctgcctcagcctccagaatagctgggactacaggcgcccaccaccgtgcctggcaaattttttgtatttttagtagagacgaggtttcaccgtgttaaccaggatggtctcgatctcctgacctcgtgatccacccgccttggtctcccaaagtgctgagattacaggcgtgagccaccacgcccggccaactaatggtttttagctaacgttttccagcaagatttgggaatagaaatgtgaacagaagctcagcataattacttattgttctgtcctgctatgagcattacttatttcacacatgattatggtgaagtcttcaggctgagtctaagctacgctcatcattgggttcctacacatttgggtgcgtcttgagtcctgaaggagtcttttgagatggtagcaggggtcctgagtgtagcatgtgtctattacttttccctgggtggccataggtcctcatcctgggccctatgaagagggactacaagacaaaaattaaatataaaagagttgttttctaaaacttttctaaggtatgtaactcacgacagcactactttaaaggttttattgcagagtacagccagacccacctggacttagctatgagggaaagttggaaaggatgccagtcacattgtgtggccactgacactcttggtgtcagcataaattgtgctgtgccctttagacaaagaattgatggctgcctggcaacctttctgtattgtctctattactagtggttctcaactagtggaaattttgcttgccaggggacatctggaaatgcccagagatatttttagttatcacagcttgaaggaatgtaagtggttggggggagttttgcccaatgaagggatgcatttgctcaggttgcttgggcttgcttacagcatggcaaccagattttatgaacaaagccccaaacttggcatttttataactaaccttggaagtcacattgattcacttctgccatggtctgttggacaaagaagtcacaagggtccaactacatttaaaggaagaggacatagatactgcaagttcatgggagggatatcaagattgcattgtaagaaaaacaagcatgttgggagatattgttgtggccacctttggaaattacaatctactgtaagtaaaacaagaatcaatcaatataaatttaggcttgaatcacttctctttttttgaacgaaagataaaactgtaaagaaatatagagatacatggaaggatgatgttaaatcaatacaaaatgatcagtgagttaaaagttacaggttctaggaaacatggctggtgaatacaataataatttattaattttaatgtcagcttcaaatttttggttctttggaaaattgtttaggcccccaaatatataggtctatgtatgtatgtatgtatgtatgtatgtatgtatgtatgtatgcatgcatgtatgcatgcatgcatgtatgtatgtatgtatgtatgtatgtatgtatctatctatctatctatctatctatctatctatctatctatctatctatagctgcattgatgctgtaagtccagagcagttttgcaaaataggctgtgttgctagagagatgctattttccttggcctgtttttaagctgctatccaatagaacatattttttttcctggttgagaaaaaactggatatgatcaatataaaaaactggacaagacactgtgtggtattggttggtaatcagacaaagcttcttgctgtggagcacaccttcctttgatgtcatttgtctccatttattggaatgaaaacttctcagtgtatgaatctttagcaaacaaaatgaagaatgctgaaaagaagcacgtagcacatacacttgaaaaattagggagaaacaacattagcagaaaaatgttctttctgtttcacctgagataagtagcctatgaaatcttgtaatcattgaaatcataattttttttctttttctttttttttgttttttctgagacagggtctggctctgttgccccggctagagggcagtgctgcaatcacggctcatcgcagccttaatctcctgggctcaaacgatactcctgcctcagcctcctgagtagctggcactacaggcatgcgtcaccatgccaagctaatttttaatttttttttttttttgtagagatggggtttcaccatgttgtccaggctggtattgaactcctggactcaagtgatcagatcgcctcagcctcccaaagtgctgggattccaggcataagccaccatgcccagcctgaaattatgattttcaatagaactattggctactgttagatttgaatttcacagattgagtctggtaaactcattggtgcttattttgcagactgtactatcggtctcagcattgaacttttagagatttcttaaatgacgttatgggattatcttgcacatcgacattataataaattccttcaagggcagcccttgactgaagtaattttcataattacgttgacctgaaaaaatatccttgcaagagacactgtgcccatatatcacagaaatacaggtattgatcatcatgtaaagggaggactgtgccagtgttggctgcagaaggtgggaagatctgcagactctttttgttagaaactgttgcagattaggttccccaggaaacagactctgaaatagagatttgtatgcaggttttttggaggagtgctcttgggatcaatactctggaagaataaagaaagtagaattgggcagagggagaagttgaactttgatatagatgcaacaaaggcctcagcttattccatgggtcacagtggagttggggtagccctagaatgaaccaaatagaggttaaggggtcagtaccttatacattgatgttgaccatcactggacgtgggctgacgcagaagaagggtcagaactttgggtaaaatgactctctttagacaccggcagttcttggaatgaggctctgctgagaattctcagcaatcagtgtttgcagcaggtaggggaataattgtctcagttctgaagagggcattcctcagcatctactgcaaaagcttatttgaactgctgaggaatacagcacaattaatataaacctaggttctctaacgtagattatgatgaaagccttattttgaaggaatacagtttcattcaaaacccatcagcatcaagcccaagatctctcatactcgtaatatcatcaggtgatactggttaattccatggcagtgaaatgttagatttgtgccatttccagaagttcttgtgtaagatgcttcaacttctgcagattcacaacagttgtcatacttattgtgagatgaatgcatctccaagatagagatgtatgcattcgggatgaatttgttaataatcataaagacagtttaaagcatcaaggatgtttgtttttaaggccctttgtcctgctgctgaaggccaaattggtagcctggggttaaagctaaaaggctgtgttgtctgttttatctctgtatggaaaaattttgacttgccatctcaagagagccatcacagatgtctcctaagaaagaactggttcacattttggctttaacaccatcagaatgatctgattatagattctcatccataaggagatagtatatagtggttaaaagcatagactgctcaattcagagcacagttctgtcatttttttttcttagtgtccttgggaaaatcaagctctgtgtttctcagttttctcatctctaaaaatgggtataataatattgttataataatagtacctccctcattgcattttaaagattaaatgataaatatatgtgcatgacagaggaagtgatttgcaggtgtttgctattatactgctctgttttttttttttaaataagaatgagccagctttttctgtattaaattactgtaccatttgtcaatttgctggaggtgcaccttttgctgtaaggaaaaaaataaaatgaataatgttgattgaaacaaaagtaagtatttttgaataatcttggagttgacatttgaagattttccttagctctgtccatatggatcaggaaaagatgtaaaacaaacaaaaaaaaccttagtctagatctttgctgaaagagggtgagattgggagtttacttttgtgaagaacctgtgtctcacatctttgatgtattgtctcaattaatcatcagaactgtcctatgaggttggcactgtaattttctcctttctgcagacagaaaccaccccccgccgacaaaaaaaaaaacaaaaaaaaacccaagacaacaagaggttatgagtagaaaccagagcagagttttggctgtgaaagaaagtaagtcagtgtgacattactgcaatgctgcagagatagacccctatcatgtaatcacagtctgacaagatgtgtacagaatgcagatgagctggagtacttgtcacatgatgaccggctgcaaaggtgtttctcttggggtgacagcagaaccattaactttactttctctgaaatcatcttttttttgggggggtagttagctagttacttcaatagaataaaaagaatgaaaactcatttagcgatataattactaaattattgggcatatgtctctttaaaaatgtaatgcaaagccattcttgtgaaatagtgtttttggtgcccccaccccatacaccgttaaagattaagttgactaagcaagaaaaggtgttaacatttttgtcagagacccctgggaatcaatatatttttgttccaagtcaccttgtattgtagttctctctggatatttggagaaagaggagatagctagattaaagaacttttgtggtgaaaattactccacttgaaggcttgtctctatcttttctgcttcagaactttatgttgattttgtgtgtcggcttgcatttttaaaaactataatatggaatagaactacatttaaatcagggaaaaaagatacatatgtggttttgaaatttctaaaattttgcatttggatagttcctctgcagttgctcagttaacatattttctttttctataaataaaatgacttgcgatcttctctctattctaggaagtctcaaagctcttcccaaggagtaaatcttgacagaaaaagaaaagcaaatttttggggggaaaattgtgaaaaagagtattaaattatttaaaaatagactgatctggaaatcatggaggaaatgatgtttacactgtgtttaaaaaataaaaaacgactcagtggatatgcatggtcctttgcacttaataagctaaagaggttcagatggaggatgatacagtataattaaaataaaagcggggaatgaccacgaatcagtcatggtaaatcaaaagaataaagacatgaaaagactttttggtatatatcaaaccatttttgaaaaagaattatgtggctagagagagtaacaatgaaaaagatatgtagaaaaatttctaaaatataaaaaatattatgtttacacagctgataagtttttatatagtaaatatactaatatcagtgcccttctcctggttcctttgaatacaagattaatgcaaaatattttttaaaaatgtatcctcttttgagccagtgaaaagtgacactttttttttaaacgaagtcacttagaattatgaccagatggttaaagaagataaattttaagagttgatttttcaaattttaaaggaaactgctgttggttttcagtgtggttcagtgagcttcatagtgcatatttgcatatgaaaaatgcttccataatattgtatttaatttactggcaaacggctcgaatatatattgtgggtttacaatgccaaaatacccagttgatttgataaagctacaagtaaattttggagttgaagagaagggagtaataaatcagttatctgtcaacttgcagaacaaagaaaatacttacttacttccccatccccccaactcctttaaactggttgaattcatattgtttagacaaaatgtgattgcattagtgattagttattgattaatcatcttataaagattaaattatttgatttctttaattagttgattttttaaaaattggcagtgaaatccttgaaaaacattagacctatgtaaatagagcctgagtaaatactcacataatatttaaccaatatttggacacactaccaaggcatcttgttaaggtattgaactaatgactgaattctccaaccactgaaaaaaatgagtgatggactaattatgtaaaaatgtcttttatcctgcatgtgattaaattggtctgttatttgaatgaaggaacaaacctttctggttgtactatccaaatcattatcatgcaggcaccatttctgttatttaaatgtaattttgtcaactgtagacatcattgttgcttctccagcattaattccattactgccctgtgatagagcagctgctgacctggataattgacatgatctccagcttcagaagcggactctaattggctcagcccaaaatgcaatcccatctccttggttccagtaattggttcaggagtgtcacatgacatgaactgttctaatcagagtgaagaccatgatatttattcaaagttgtctctccttttgtgtggtgtggtgtgttgatgtgaggcctggaattgctgtagatactttgctatctagtctcaggataaagctgacacatcagggtgtgcggagagatcagtgaattacagagaaatagacgggagccctgatcaaaccatgccagaagcctaaaggtcttttgaacttcattagctgatgcattccatttattattattcagttcatttattttatctctatatatcatatataaatataataaacttatactatgttataaatgtttattatatttatataacttattacattatgttataaatatttactatatttattagtcagtttgtgttgggccctttagtatgtacaaatgaaatcatcctaagagtttcaacgactcaacagcaccatggccaggacctattattggtccttcatcttcacttccctacacaaaatcactaatatgagattcttttctcttctagctgcttctaagttgagtttgaggtacagcgaggtgtgaaggtaaagaaagctctccataccttagctttgaataaaccttcaaatatttggatgtagtataatttatttaactctttattttgaaataattatagatctataagaaactgcaaaaatagcacctagagtgcctcgaatccttcccttcattaccctcaatggtgaataatatataatcacagttcaatatcaaagcaagaaaactgacattggtgtaatactgagcaatgtttattttattttatttatattatattatattatattatattatattatattatttttgagacagagtttctcctctgtcggccaggctggagtgcagtggcacgatcttggatcactgcaacctccaccttccaggctcaagcgattctcctgcctcagcctcctgagtagctgggattacaggactgtgccaccacgctgggctaatttttgtatttttaatagagaaagggtttcaccatgttggccaggctggttgtgaactcctgacctcaggtaatttgctcacctctgcctcccaaagtgctgggattacaggcatgagccaccgcgcctggcccaatgtttattttttagtagaatgatttttgttttgagagaagttttgaaataaacactaataattcattcattcttatagctgggacattcattttagtaggttagcatatatatgctatatatatgtatatatgtgtgtatatatatacatgccatacatatgtatatatgttagtacacacatgccttcatgcaaagatacatatatctatttagaggatcagagtattattcaaatatttagattaatacattgtaaatagttgtagctttttttggacatattactaagcacatctgtaatttatttttattttttaatttctttttttgatacataataattgtacatattttcagcgtacatgtggttttctctttgccttctaggataccaaaactgaatagttcatcactttatggttccctaatattaagtagggttcactcattctttttaattcttttttctttatttttatctaactgagttatttcaataggcctgcttcaagttctgagatttttttttcttctgcctgatctgatctattgttgaagtgttcaagcgtattttttattttacttagtgaattcttcaattccaggatttctgttatttttaatgacatccattatttggcaatttttaaattcatgtgctgaattgtttttctgatttctttgcattgtttatctgtgttctcttctgtctcagtaaatttttttttttatttttatttttccagacagagtctcattctgttgcccaagctggagtgtagtggcatgatcttggctcactgcaacctatgcctcccaggttcaagtgattctcctgcctcagcctcctgagtagctgggactaccagtgcctaccatcacacccagctaatttgtgtatttttagtagagatggggttttaccatgttgaccaggctgttctcgaactcctgacctcaagtgatctgccagccttggcctcccaaagtgctggaattacaggcctgagttaccacacccagtctatctcactgagttttaaaaatatcactgtattttatattcctttcagtatacatacccaccaatgggattgctgggtcaaatgttagttgttttaggttctttgagaattttccaaactgcttttcacagtggctgaactaatttacattcacaccagaagtgtataagcattatactttctcagtaaccttcttaacatcttattttttgagtttctaataattgtcattttgactggtgtgagatagtatctcatggttttgatttgcatttctctaatgattagtgatgttgagtatttttttgtatacttattcaccatgtgtatgtccacttctgagaagtgtctgttcatgtctgtttcccatttttaaatggggttgtttgttctttgcttgttaattggcttacattccttatagactcttgatattagacctctgttaatgtatagtttgcaaatattttctcttattctgtaatttgtctgtttactctgttgatagtttcttttgctgtgcagagctctttaattaggttccattttttcttgatattgcttttggagacttataaatcattctaccaaaatgacacatgtacttgtatattcattgcagcactactcacaataacaaaggcatagaatcaacctagatacccatcagtggtggtctggataaagaaaatatggtacatatacactatggaatactaagcaatcacacatacacaaaaacaaaatcatgtcctttgcagcagcatagatgcagttggaatccattctcctaagcaaactaatgcaagaacagaaaactaaataccatgtgttctcacttataagtgggagctaagcactgagtacacatggacatagtgtgtactcaggaataataggcaccggagattactaaaggagggagagaggagtggggcaagggctgaaaaattacctgttggatactatggtcactacctgggtgatgggagcatttgtacccaaaacttcagcatcacacaacatacccatgtaaaaacctgcacatgtactccctgaatctaaaataaaagttgaaatttttttaaaaagaatgagttcacctaggatatactgcattttaaaataatttgatttttaaaaaatttaatttttaaactaatagtaaaattaactatttttggtgtacagttgaaacaattttaacacataaacagatttgaattcccatattataatctggatgagaagttttactaccctagaaatttcccttttgctcttcctttgtagtcaccccttcacctctcctccatcctctcaacccttggcaaatactgacctattttctgtcactctagttttgtgttttaaagaatgtcatctaaacagaattataaagtgtgtacacttttgagacttgacttttttcactaggcatgtttttgacattcattcaagttgttgcatataaaagtagttcattcttttttattgctgagtagtattccattctatggatgtatcacagtttgtttattcattgatttattgaagtgcatttgcattttttcccagtttttggtgattatcactagaactgctataagattcatgtgcagattttattgtgaacacaagttttgatttctctggtttaaattcccaggaatgcaattgcttaatcatatggtaagtatgtgtaattttataaaaaaatgttaagttgttttcaagagtgactttaccattttgcattcctgccagcaatatacaagagttacagatggtctgtctccttgtcaaataaaattgtttatttttagccattctaatagatgtgtggtgatatctgctagtgattttaatttgcatatccctaacaactaatgatcaatgttaaatatcttttcatgttcttttgaatcatctgtataccttctttggtgaagtttctgttcaagtctttgagttttaaaattggattattttcatactggtgagtttacaaggttctttatatgttctggatacaagtacttgttggatatgattttcaatattttctcttagtctgtagcttatctttttagcctcttagtggcgtttttcacagagtgaaagtgtttaattttgatgaaatatggtttatgagtttgtttcttgttggactaatgcttttgatataatgccaaaggacactttggctaattgaggtgataaagattttctccaattttttgaaatgttctatagttttacactttgatttaggtccatgatttttttaagttcgattttctgtgaggtataaggtttaagctgaggttcattttttatgtatgtatgtacaatttgtccaatcgtttgtggaaatgatgatcttttcacgatttgattgcctttccacttttgtaaaagaaatcagttggctcaagggaatgaaaagacaaaccacaaattaggagaaaatatttgcaaaaatatacctgataaaggactgtttcccataatatacaaataacttaaaattcaatgataagaaaaaataaagtcaataaagaatatattgatggaaaatgaacagaggaaaagatgttttgtatcatgtatcatttgggaattgcaaattaaaaccatgagatacggctctacatctgttccctgtcactatagacacctattagaacagctgagattcaaaacactgaacgcaaatgctggtgaggatgtggtgtaacagggatgctcattcattcatttctggtcagaatgcaaagtggtacagccacttttcaagatagtttagtagtttttcacaaacctaaatgtacttttatcatacagcctagcagttgtgctcttggtatttatagaaatgaattgaaaacttatatccacacaaaagcatgtacacagatgtttttagcaagtttcttcataattaccaaaacttggtagcaaataattttttttttgacagagtctcgctctgtcacccaggatagagtacagtggtgcgatctcagctcactgcaatttccatctcccaggttcaagcagttctgcctcagcctcccaagtagcttggattacaggagcacgccaccatgcctgctaatttttgtatttttagtggagatggggtttcaccatgttggccagcctggtctcaaactcttgacctcaggtgatccacctgcctcagcctcacaaagtgctgagattacaagcgtgagccaccatgccccagccccaagtgttttttaatagtgagtagataaataaaccgtggtatattcaggaaatggaaatttattccgcgttgaaaagaaatgagctatcaagccatgaaaagatatggaggaaacttaaatgcatattagaaagttaaagaagcccatattaaagtgttacttgttgcagagggtccaactatatgacattctagaaaaggaaaaactatggagacaataaaaatatcagtggtgccaggggcttgtgggtgtagagatagatgaacaaacagagcacagagaatttttagaaaaaaaacgaattgtccatatatgtgggagtctacttctggattccattctgttttattgctttatggtttttttgttttttgttttttttttttttttgatggagtcccactctgtcacccaggctggagtgcaatgacacgatctctgctcactgcaacctctgcctcctgggtttaagcaattctcttgccgcagcctcttgagtagctgggattacaggcacctgccaccatacctggctattttttttttgtaattttagtaaagatggggtctcaccatgttggctaggctggtgttgaactcctgacctcaggtaatacgccgcctcggcctctcaaaatgctgggattacaggtgtgagccaccatgcccagcctgttttatgtttttatccctccaccaatagcataagacagctttatagttagtcagcctatttcataatatagctttatagtaggatgtctatagtagtgttcttggtgttgcgggttactttcaattgttcctttaatgtgaagttttgtatcacttcttctaagtcatcttcatcctttttgtcactactacattccttatttatgtcaataggtttaccttctatcagttcttctggctgcatatctggagttccttgaaagcaacagtgtattaatctgttctcacactgctataaagaactacctgagactgggtaatttatgaagaaaagaggtttaattgactcacagttctgctggcttaacaggaagcatgattgagggcttcaggaaacttacagtcatggcagaaggtgaaggggaaggaatcacgttcttcacatggcagcaggagaaagagagcaaagggggaagtgctacacactttcaaacaaccagatctcgtgagaactcattcactatcacaagaacagcaagggggaagtctgcctccatgattcaatcacctcccaccaggtccctcctccaacacatggggattacaatttgatatgagattggggtggggacacagagtgaaaccatataaagcagtatcaacattctatcgtcagctatttcctctataactccatctgtgttgcattcagatttaacttctttctgtgctttcatttttgttggacaattttctcttttcattatccattaaaaaaagtcacatgggtttatcactaaggggaccaggagacaacatgactacatgctctgctatctgtgcatgaattgcataatgtacagtgataatcactgatagatattaaaataagttattgattagtcatgtatcatgatgcatatctgttattatgtagtgatttgtggactaaaatgctggaagcaaaacttgtactttatgaaattattcacatgtataccatagtaactgaaatttgaacagaatgatatgatttggctctgtccccacccaatctcatcttaaattcccacgcattgtgagagggacccagtgagaggtaattgaatcatggggggaggtctttcctgtgctgttctcctgatagtgaataagtctcatgagatccgataactatttaagggggagtttctctgcacaagctctcttctcttctctgccaccatgtgagacatgactttcaccttctgccataattgtgaggcctccccagccacatggaactgtaagtccattaaacctctttcttttgtaaatttcccagtctcacgtatgtctttatcagcagtgtgaaaacagacaaatacagtagctaatgcagtgttcggagggaaatttatggcaataaatgctcacacccacagaccaagaacagctgactttgaacactgttcacacaaagactttgaacagctccaatatacatgactttcagctaccactgtttaattaaatgtatcagtctctcaacaatactgttcaaatttcagttactatagtatacatgttgttaataattccataaagtacaagttctctagggagttccaaactttcccacattttgctgtcttctgagccctccaaactgttgcaacctctgcctgttacccagttccaaagttgcctccacattttttgggatcttttcagtagcatccctctctactggcaccaatttactgtattagtctgctttcacactgctgataaagacatactcgagactgagcaatttacaaaagaaagaggtttaatggacttacagttccatgtgcctggagaggcctcacaatcatggtggaaggtgaaaggcatgtctcacacggcagcagacaaaagaagacagcttatgcagggaaactcccccttatgtaatcatcagatctagtgagacttattcactatcatgagaacaacacaggaaagacctgccccatgatccaattacctcccaccgggtccctcccacaacatgtgggaattcaagaatatcagctacacttgcaaattttgatatgctatattttcattgttgttcacttcaaattattttataattttccttgagattttttttcacccatggtttacttggaagtttgtcttttaatttctaaaggtgtataatttttcctactatatttctgttatttctaatttaattccattatttcagagaacattcttcgtatgatttaagttctttgaatttgttaaggtgtattttataaccctggatatagtctattttttttatctgttccatgtgcatagaaagaaaatctattctgctgttgtttggtagaatgttttataaatgtcacttaattacagttgttagatggtgttggtcagttcttttatatccttgatgactttctgtctactatgtctattgcttgacgatagaggggttttgaagactccaattataattgtggacttacctatttattctttcagttctgtcagtttctgcttcttgtattttgaagctctgttcttagttgcatacatgtttaggattgtattgtctttggggtgaatgaactcttttatcattatgtaatttgcctttctatccctgattttttaaatctctgagtctattttttctaatgttaagtctactactccagctttattttgattagtagtttcatgatttatctttctctgttgtttcacttttaaatgacatagttcattaaaatgagtttcttggagacagcatgttattagaccattaaaaaatctgttctgacaacttccatattttaagtgacatacttggatcacttatatttagtgtaatttattgatgtatttgggtttaggtttaccatttattatttgttttattctatttctagtctttgtattcttgcttcgctttccctgctttattgtgtcttatctgaacatttaaaaattcagtttagttcatccaatgtatttttactattttttacatagtttattttatgattgctgtagaaattataatatgcatgcttaagtttttgcagtctacttagaaccatttttttcctacttcagacgggattcagacaacatcacataggttctaaaatgattgcttttaaaaaaactggatctttgattaaccatgtaatgcagacccatccttataacttttcttatgtcttagaagtatattacccaacatatagatattggtaagttaaagaaaaatactattttactctaaacaaatctattataatatcactactttagaaataagctatttgttaaaataatttgatgtgtatagagcagaggcttattaatattgaatgcatttatgaagatagaatttgatttacagggatttcccccctccaaataactgaataagtgagtgaattagcatacacttaacatagaaaatgagttttctgtgcatcaaaacgtattcacagaaaaactttcatttgtgatacttcttataactagtttctggaaaaagaaaataactgaattgtgactttttgacatagttaataaaaatgttgtctaccttttaaattctaataatactttagaacaggaattaaagtatggcttttattacaacaatatcaattagcatgtatgtgttgtttattttcatattttaattgctacttctaaacaactatataaaattaattccttcttaatatgagaaaactgaaaaatggagaagttaagtaatttcccaagatcatacatcttgagtaaaagaggcagaatgaaaattgagtagtatggcttcagaactcacaccgtgaagcaccatattatctgatccttagaggagagggcagtagtattttggtattctcaacttaagaatctttaaagttatttttaaaaagaagggcaatatgttgtatgtgtgtctttgtgtgagtgtcagtgtgtgtgttatgtatgtatatttctgtataattttttatcacaataagtttctaatttggttaaggattttgtgttgcttccataatgagaaaacgattctatcaggcattagtgtattctaatgctttgatgtttactttcaggcttccctttgatctctttacatattgatatgtgtacaaatagcatgggacaaccatgtcttgaatgccacatctaagaatggccacaagattacagtcttaaaactttaatgagcagaacccaaattggtaacattatgcatgtgatgataattgctctctaaagcggatcttttctcatgccattctccatttttttgaaggcttaatttaagaacactattcaccagcagttaaatggctactttattcttttctactttatttatttcccattctttttcagatgttgctttctgtaaatactggtctgaaaggaaaggttcagcaaatcaaattgttgaaggttgcaatgtctgagaatcggaaccagctttgctggtataaaatatgtaaaaggacattcccattatagaaatatacttttcttattctccagtaaaaaaataggaatatattaggcactacattcttcaaataatttgaaaattctactattctaatacatgatatgaaatgtcttaataagaaattgaacttaggatggataaatcttttgtgagaaaatgtgcctacagatattagacttctttcattcatcacttacctaatccctgtccctttctagatgttgacaaaacagaaaatgacaggtgattcctttgcagtatttacaatgctttgatatttatttttgtctttaataataatcatctatgaaaatttctgagacattttttccactatctaaacttcagtttttatttcctccttgttcatcagctatctctcttttcaattatttcattttagtatatgttggacttttaaagattggctttaatataaaaatgtacataatttcatggtaggagagttttcacagattgggcagaatcatgcaacatattcttttaataggcatttagaaaaagaaatcttagtacacattcgtatgtacactaaatagttctaatattttatgtgtttgataaatatgatgatcctggaaaatacatagcaatggtagtcccagttagacaaactttccattataattacactggccacaaaggcagtttgtttacatggcatcaaagagcctcacttgctacaccattgctaaatcctgagccctaggttttcatcagtgtcagttataatccaatgagatcaaaggtgaaggtgtgccaatgaaaaatcactcctgaccttccatcatggcagacaggaggcaggattagattgcagctccgactcagatggacagagaagcatgtggtggctagcactgtgaattttagctccagaatgactgcaggaataaatcatgaaaccggagaggacccacagaccctctgaagaaagtggattgcttctgcaggacccaggagacaccctagatactgtgattgcaccaactgtggaagtgggaaagggagatcttctgtccctaaacacacaccccccactggggaaattgaaggtctactttacaggagaagatcctgatcttacctggagctgagtcaatttagagagccaggcaagatgcaggggtacaggaagccatgggaaagccctgtaggctcggtgggtccccaaggccattcttgcctggcattaccgggattcttcaggaaggtggccagaggtgcagggaaaatgccacagggagaaggaaatctccagctgcactttgtaacggtttgaactgattgagaagcctcctggccagaactcgtgtgagggtgtgaatctggcatgcagactccacaggaggaagaacaactaaaaccctcctttctttcatagctgggaggcaggtagcctgaggcaagttctcagccctgcttacccactgcctagaaatagactcagtgctgttagtgggggcacggtgggaaagagagcagcccttcagattgcatggcagctgggtgaggcctgtgactgatggtttcccctacttccctgacaacctgcatgacttagcagaggcagccataattcccctaggtccataactccattgacctccattgaatatcacccccatcccccacagcagccacagcaagatccacccaaagtgagtactacatcaagggaatgccctatgggacaaaagaatctgaacaacaggcttcagccctagaccttctctgtgacagagcctatccaaatgagaaggcaacagaaaaccaactctggtaatatgacaaaacaaggctcttcaacacccccaacaatcacactagttcaccagcaatggatccaaaccaagaggaaatccctgatttacctgaaaaagaattcatgatgttagttagtaagctaatcagagaggcaccagagaaaggcaaagtgcagtgcaaggaaatccaaaaaataatacaaaaagtgaagggagaaatattcaatgaaataatataaataaaaaataatcaaaacttcaggaaatattagacacacttatagaaatgcaaaatgctctgcgaagtctcagcaatagaattgaacaagtagaatgaagaaattcagagatcaaagacaaggtctttaacccaatccaacaaagacaaagaaaaaagaataagaaaatatgaacaaagcctccaataagcctgtgattatgttaaacaaccaaacctaagaataatcaacattcctgaggaagaagagaaatctaaaagtctggaaaacatatttgttggaataatcaaggaaaacttctccagctttgctagagacctagacatccaaatacaagaagcacagagaacacctgggaaattcattgcaaaaagatcatcatgtaggcacattgtcgtcaggttatctaaagttaagatgaaagagagaatcttaagagatgtgagacaaaagcaccaggtaacccataaaggaaaacctatcagattaacagcaaatttctcagcagaaaccctacaagctacaggacattgggacccaatcttcagcctcttcaaacaaaataattatcagccaagaattttgtatccagtgaaactgagcatcatgtatgaaggaaagatacagtctttttcaaacaaacaaatgctgagagaatttgccactaccaagctactactacatgaactgctaaaaggagctctaaatcttgaaacaaatcctggaaacacatcaaaacagaacctctttaatgcatacatctcacaggacctataaaacaaaaatgcaatttaaaaaacaaaaacaaaacgcagaaaaccaaggtacacgggcaacagatagcatgatgaatggagtggtacctcacatatcaatactaacattgaatgtaaatggcctaaatgcttcactttaaagatacagaatgcagaatgctaagaattcaccaaccaactatttgttgccttcaagagactcatctaacacataatgacttacataaactgaaagtaaaggggtggaagaggcatcatgcaaaaggataccaaaagcaagccagggtagttattcctatatcagacaaaacaaactttaaagaaacagcagttaaaaaaacaaagaaggacattatataatggtaaaaggccttgtccaacaggaaactatcacaatcctaaacatatatgtacctaacattggagctcccaaaattataaaacaattactaatagacctaagaaattactaatagacctgagcaacacagtaatagtgggggacttcaatactccactgacagcactagacaggtcatcatgacagaaagtcaacaaataaacaatggatttaaactataccttggaaaaaatagatttaacagatatatacagaatattccatccaacaacagcagaatacacattctattcaacagcccatggacctttctccaagataaaacatatgataggtcactaaaagagcctcaatacatttaagaaaattgaaattatatgaagcactctctgagaccacagtggaataaaactggaaatcaacttcaaaaggaaccttcaaaaccctggaaatacatggaaattaaataacctactcctgaatgattattgggtcaaaaaatcaagatggaaatttaaaatattttttgaattgaatgacaatagtgacaaaacctatcaaaacctctgggttacagcaaaggtggtgataagaggaaagccccaaatgcctacatcaaaaagactgaaagagcacaaagtgaaaatgtaaggtcacatctcaagaaactagagaaacaagaacaaaccaaactccaaaccagtagaagaaaggaaataaccaagatcagagcagaactaaatgaaattgaaacaaagaaaaacaatacaaaagataaatgaataaaaaagatggtccttcgaaaaggttaataaaattgatagaccattagcaagattagccaagaaaagaaaagagaaaatccaaataacctcaataagaaatgaaacaggagatattacagctgacaccacagaaatacaaaagattattcaaggctaatataaacacctttacacgcataaactagaaaacctagaggagatggatacatttctgaaatgacacaatgctcctagcttaaatcaggaagaattagataccctgaacagatcaataacaagcagtgagattgaaatggtaacttaaaaattaccaacaaaaaaaagtccaggaccagacagattcacagcagaattctacctgacattcaaagaagaattggtaccaatcctattgacactattccacaagatagagaaagaggaaaccctccctaattcattctgtgaagccagcatcaccctaatacccaaaccaggaagggacataaccaaaaaagaaatctatagacatatatccttgatgaacatagacgctaaaatccttaacaaaatactagctaacagaattcaacaacataatcaaaaagataattcactgtgatcaagtgggtttcataccagggatgcagtgatggtttaataagtcaataaatgtgatacaccacgcaaacagaattaaaaacaaaaatcactttatcatctcaatagatgcagaaaaagcattcaacaaaatccagcatcggtttatgattaaagctctcagaaaaatcggcatacaagggacatacttcaatataataaaatccatctatgacaaacccacagccaacataataataaatggggaaaagttgaaagcattccctctgagaactggaacaagacaaggatgccactctcatcactcctcttcaatatagtactggaagtcctagccagagcaatcagacgagagagagaaaaaaaaaagggcattcaaattggtaaaaaggaagtcaaactgtcactttttgctgatgatatgatcatttacctcaaaaaccctaaagactcctccagaaagcccctagaactgataaaagaattcagcaaagtttctggatacaaaattaatgtacacaaatcagtagctcttctataagccaacagtgaccaagcggagaatcaaatcaagaactcaaccccttttataatagctgcaacaaacaaacaaacaaacaaacacacacttaggaatatacctaaggaggtgaatgacctctacaaggcaaactagaaaacactgctgaaagatatcatagatgacagaaacaaatggaaacacatcccactctcatagataggtagaatccagattgtgaaaatgaccatactgccaaaagcaatctacaaattaaacacaattcccatcaaaataccaccatcattcttcatatagttagaaaaaacaattctataattcatataaaaccaaaaaagagcccacacaaccaaagcaagaataagcaaaaagaacaaatctggaggcatcacattacctgatttcaaactacattataaggccatagtcaccaaaacagcatggtacttgtatgaaaatgggcatgtagaccaatggaacacagcagagaacccagaaataagcccaaatacttgcagccaacttatcttcaacaaagcaaacaaagacataaagttgggggaaggacagccttttcaacaaatgctgctgggataattggcaagcaacatgtaagagaatgaaactggatcctcatctctcatcttatacaaaaaaatcaattcaagatggattaaggagttaaatctaaagcctgaaactataaaaattctagacgacaacattggaaaagcccttctagacattggcttaggcaaggatttcatgaccaagaaccgtaaagcaaatgcaataaaaacaaagataaatagctgggacttaattaaactaaagagcttttgcatggcaaaaggaacagtcagcagagtagacagacaacccacagagtggtagaaaatcttcacaatctatgcatctgacaaaggagtaatatccagaatctacaacaaactcaaacaatcccatcaaaaagtgggctaaggacatgaataggtcattctcaaaagaagatatgcaaatggccaacaaacatgtgaaaaatgctcaacatcactaattatcagggaaatgcaaatcaatatcacaatgcgataccaccttactcctgcaagaatagccataatcaaaaaataaaaaaatggtagatgttggcatggatgtggtgatcaaggaacacttgtacactgctggtagtaatgtaaactagtacaactactatggaaaacagtgtggagattccttaaagaactaaaggtagaactaccatttgatccagcaatcccactactgggtatctacccagaggaaagaagtcattatacagaaaagatacttgtacacacaggtttatagcagcaaaattcacaattgcaaaatcgtggaaccaaccaaaatgcccatcaatcaatgagtggataaagaaactattctgttggaacaattaatggaattatctctttgaagagtcccagactgagtcaaaaaaccatatatatatacatgtatatatatatatatgtgcatacatatatacatgtatatatatgcgcatacatatatacatgtatatatatgcgcatacatatatacatgtatatatatgcgcatacatatatacatgtatatatatgcgcacacatatacacacatatatgtgcacacatatacacacacgtgtgcacacacatacacacatgtgcacacacacatgcatacatatatacacatatgtgcatacatatacacacatacgtgcatacatatacacacatatgtgcatacatatacacacatatgtgcatacatacacacacatatgtgcatacatatatacacacatatgcgcatacatatatacacatacatatgtgcatacatatatacacatacatatatacatatatacatatatgtatgtacgtatatatatacatttatatatcacagtttatatatgtgtgtgtgtgtgtgtgtgtgtgtatatatatatatatatatatatgagatggaatactactcagccatagaaaggagtgaattaacagcatttgcagtgacctggatgagattggagactattatgctaagtgaagtaactcaggaatggaaaatcaaacattgtatgttttcactactatgtgggagcttagctatgaggacacaaaagcataagaatgatacaacggaccttgaggacttgggaggaaggatgggagtggggcgagatataaaaaactacaaatagggtgcagtgtatactgctcaggtgatgagtgcaccaaaatctcacaaatcaccaccgaagaatttactcatgtaaccaaacaccacctataccaaaataacctatggaaaaataaaaaataaaaaggaaatgaatttgtagcaacagtccaaattaatagctacaacagaagtgtagtttccaggtagaccaatggataatacattcctttacttgcaagacagcctgcctataatgcagaagaaaaatgcaatagttgggataggctaagttagcctgcggcaacaagcaattccataactttagtggctcacaacggaaaagagtatttctcgttggcactgcatatctatcagctctgttccacgtagtattcactcaggctgttgaggcaaaaggaagaaacgatcatgaactgcaggcgcgaggcactaaaaggagttggaagaaagaatatttggggaaaagtaatatagtgtattagaacaattaatggaattatctctctgaagagtcccaggctgagtcaaaaaaccaggttccacttctttcttggctgcctaattcttaacacttggacaaatttatcttgaacctctctgagcttcattttcacaatccagaaaataaggggatggggtcccatgactcttaaggtgccttccagcttggaagctgtgtgatcagaggctcctgatggctaaaatagggaccctttcaccagctaggacctggaactcatcaccaaagtttttctctaaaaactcttctgaaagacaaatatcacatgttctcacttatatgtggaagctaaaaaaaaataaaaaaaataagaaaataaattaaaaaattgaactcatggagaaggaagtagaatgatggttaccagaagctaggaagggtagcggagagggggtataaagtggggatgattaatgggtacaaattacagttaaatagaatgaataagatccagtattcggtaacacaatggggtgactatagttagcaataatttattgtatatttaaaaataaaacagtgaaattgaaacagccctaacacaaagaaatgataaatgctcgaggtgatggataccgcaattaccctgatgtgatcattacacactgtatgcctatatcgaaatatctcatgtaccttataaatatacataattatattcccataataattaaacattttttaaaagaaaaaagctactcctatatacattaatttatctgactttagcaaaaagagctaggttttttgtacaagtgagataaaaatttcattttgaacaaaggtggcgaggtggccaggcatggtggctcatgcctgtaatcccagcattttgggaggccaaggtgggtgaatcacgaggccaggagttcgagaccagccatgccaacatggtgaaatcctgtctgtactaaaaatacaaataaaatagctgggcatggtggcgggcgcctgtaatcccagctacttgggaggctgaggcaggagaatcgcttgaacctgggaggcagaggttgcagtgagccgagattgcaccattgccctctaacccaggcaacagtgagagactccatctcaaaaaacaaaaaaaggtggagaggtaatctctgacagagatagctaatctgatctctgatcttgttttgataaaagccttgattgctaataatagtcacatcatttttttcatgtaaatttttcctctttctggtgtcatcagaactttcagcaaacatacccttcttcacatgattttccagtgtacttctggttcatagacttaatcacacaatatgaattattcaaatcagcaagaattatgaaggaggaagcaatctcaatattttcctcttgttctcagaatagtgcacactttcccacctctgttttgaagagaagatggaagatgtggatattaaatccaacattgcacacaaatactatggcaaggcagttagtcaataaggattgaaaaaaatacataggagtgtaaattttatcatttcctttgaccattatttaaattattcaaaaattagctgacagtatttttattagatgtaaattttttcttttaagagttggaaaatttcagaccacaggagaagcacatacaggcagattgaaataattaacacatagtttagacaacctttgcatgcttgcatagcccagaatatgttagaatgatgctttccgttgagaatagtggataagagatgattgccatctgggaggagatgaagacggggagatggagagacagatagatgaacaattaatttgacaactatagatatgtcaggttgtatgggaaggcagagcaattaatttaatcccgactgaatagctgggaaggaaaaagaggaaacattgtggagaaaagcacaaaagtctgaatgcttgtgccaatgacctagaagtagagaagaatccagtgtgcctagaaaatagagtgtcggatagaacagtaggaggggcctaggcgatgcgctgtgaagacgaccctggaggccacgctggtgagttttcgcttttttgaaaaggatgagatgtagaaagcggggtggatgagagactttatcactaatggtctgtctctcattggtgaatagatatgagttagttttgatcaaaatgctgaatttgatagacaaaaatttattgttcaaaaatatctgatatggaatatagtttatatcaaatcttttattattttgagacagagttttgctcttgtcgctcaggctggagtgcaatggcatgatctctgctcaccgcaacctctgcctcccgggttcaagcgattctcctgcctcagcctcctgagtagctgggattacaggcatgcaccaccacatccggctaattttgtatttttagtacagatggggtttctccatgttggtcaggcttgtctggatctcccgacctcaggtgatccacccgcctcggcctcccaaagtgctgggattacaggtgtgagccaccgtgcccagccagcttatatcaaatcttattttacattggacttcatgggttttcacctcccatctcctcccaatatgttacttccaaatagtgatttattaaaaaaaaaaccaactctacaaatttgcttctctgactgattctgtgacatttgcccatacgcacacatacaaataaaacaaaagaaaattgggcgtaagaaaatattttttccatactaggttttgagaaaaaattgaaacagattattcaaccactatatacaaaattgaagcagcaagataatttcatgcaaaaaatttctccttatcaagacattttatgcttttaagggaaataaatatgtgttctaaagccataactttgtcctacagagaatttgaagaaatccagtttttccatgatgatgttatccagaatttaattacataattaaagaagatttgctatgattaggaaatatcaaggcatttagaacaagataaattgtagtttcaaaaaagaaattcacacccttctatagatgctccaaggcttttatgcacacgcagaggtttagaacaaattcattcaagcacttaaatggtaaataatcctaacgtgaatatcagttcattcctaaaacatcactgtttttatggaagtttgaaataagattaaaccaatttttatttaagacctataaacggttttgattaaacaactaaattctctttcaaaataaagctaatggccacaaagaatgatatgtatgtaaaggaaaatcttcagcattcttttgcagctgtgtactgcttggctggtggagggctctaatatgaacttggacctctgccgatgggcttgctgcgatgcatgatgtacagacacctgcactgatagccatgagattcatgctgttgtatcaatgtcatacctcacaggcctaacaagtaagtacaaacctaggaagtaagaaaaacattcacactgaaaaaagactagctggggatctgatatttcttagtttgtaacctggacagaagtctcccatacagaactccgctggcaatccagatttgggcatcatcttttcaacaaacatttgagttccttctacgttctagtgaggaggaagttgtagacagcttgggcaaggctcctgctgtaagatagtgtataagacagacattgatgaaatagtaaagaggcaaataagatcattacagattgtgatcattgctatgaagaaaatcagcaagttgatacctaagagagtaaccagggcagggccttatagagaaagtaataggaagagtaaatgaaacgatacagttgaggttaagatttaaggacgtgaatgtgctcgacatccaaaaagccatgaaaaaagaattccagaggaagggcaaaactcttgaagagaaaaggagctttcatttgttcagcaaatgctgttatgcaaaacctaagtgtaatgacaaggagcgaagaaattcatgatctgatagcttttgttcagtatctatcttggccatatcttgagactatggagtggcattgatggcacctatatttctattttatttttattttttattatactttaagttctagggtacatgtgcacaatgtgcaggtttgttacatatgtatacatgtaccatgttggtgtgctgcacccattaacttgtcatttacattaggtttttctcttaatgctatccctttcccctcccccaacaccacaacaggccccagtgtgtgatgttccccaccctgtgtccaagtgttctcattgttcaattcccacctatgagtgggaacatgaggtgtttggttttctgtccttgtgatagtttgcttagaatgatggtttccatccttttttgtggctgcatagtattctgtggtgtatatgtgccacattttctttctctcttttttttttttttgagaaggagtctcgcttggtcgcccaggctgctgtgcagtggcatgatcttggctcactgcaagctctgcctcccggattcacgccatttgcctgcctcagcctcctgagtagctgggactacaggcgcccgccaccatgcccagctaattttttgtatttttagtacagaaggggtttcaccatgttagccaggatggtctcaatctcctgacctcatgatccacctgccttggcctcccaaagtgctgggattacaggcatgagccaccacgcccagccttcatgccacattttcttaatccagtctatcattgatggacatttgggttggttccaagtctttgctattgtggataggatggcacctatatttcaacttcacttttgtagctcatgtgtcctttgaggcagcttgatttttaagaatcaggtgatattagctagaacctcttcccactgggggtaaaagattgggagggggagcagcacaggcaggaaacacagataaaagtgtggcttgcattttttctaatcttttctggcttggagtctttaattttgccaacaaaatgcaggaaatgacatatttagccattttgagaattcttatctttttcctcacctagttgctcccagtgagaactatcaaggacacaaggcatttgtgtaagttgtcaatattaccgaagacatagggtaatagaaagggaggttactgctcagctttatagcagatgaactgttgagctgaatatttcacattctgcttctgtggagtcccttgagcatttccgtcaactcagattctaggtttctttcccatctcttttcttcttccttttaaaaaattaaagaagttttagttgatgaataataattgtatatatttatggggtacaatgtgatgctttcagatatatatacacacatcgttgaataattaaatcaagctgattaacatatccatcaccacctacttagtattttgtgtgtttggtgaaaacatttaaaagctactcaacaattttgaaatatacagtatattattattaacaatggccaccatgctgtgcaatagtttcagttagacaggaggtataagttttagtgatcttcccctttaactgctcccagcaactccaacaaaatcctgcttagcagccttcagagttgccaacatttactccttctttgagggctcagcattgccagttggaatgatggtagctgttggcttggtgtgacttgaaagcctagcctgccccagagtgtttccatcagtggtcagacaacagcatctgcaattcttactattacagcccttcttctgtcttactcatgacctccagaagagccctgagtctgctgcccagaagaagaaaacctcataaccagttttcatgccccatcagccattacaattttttttttaagggaaaagtaattcttcaggttggttggagagtagagacaaagaagggggggaatggaaaaatagcccaagcttctaccaggaaagcagcatgatccatgatgggtcaaccctgagggctagggtaagagtgggagtatgtttagatataggacaaggtggctttgtaggtatagaatggaagcaggaactccaaaggataggtttgtgcatgcgtgcggtacataccgtgcagaggagaaaagatactggcttcaagctttgtgtatggctccctctgatcctataacccagactgactcagtgaccttgcctgaccttagagaaattttgcagacggactacctcatgagctcaccaaagcaaagtagcttggatagttctatattttagctagaggcaagaatctgtactaaatataaaggtttgctgccttgttttttatttgcccttaagaatttttatattcaatataatctatatttttcccccagaaggactcagtagattacctccttattactgatttatttaaaattccagttttagcagagagaggtttctctttagtctttccacagacaggtaaaatgccaaattaaacatgtaaggagtccaagtaaaaggaatactgattaatcggtatcttatttatctttggaacatttagcaatcctctttctttaaatagggaacttatgggccgggtgcggtggctcacgcctgtaatcccagcactttgggaggctgaggcgggtggatcacgaggtcaggagatcgagaccatcctggctaacatggtgaaaccccgtttctactaaaaatacaaaaaattagccagacgtggtggtgggcgcctgtagtcccagctacttgggaggctgaggcaagagaatggcgtgaacccggggggcggagcttgcagtgagccgagatcgcgccactgcactccagcctgggcaacagagtcagactccgtctcaaaaaacacacaaacaaacaaaacaacaacaacgacaaaaaatagggaacttgtgaatcattgacattgggatgtaataatttatatatacatttatgacttacttttaggatttttaaaattatgattttatcttgatttccaccttagtttacaaattttggaaaagctggtattgatttcttatatatatttattcaaatcatttctgaatttatgtttaaaatgttaaagcatactgaattgtataaaaacaaaataaaaagtgccttgaatccttctatcactacccagaatgatccactattaatatattggtctactttcttcttgtcttttttctattcaggtatattagtgcgtatataaatatacacactaacatacttaaaaggtgtatctatttatacctaaaacaaatttgtaatattctgaataagtagttttaaatgatgctttgtcacctaacaattgtcattgggtatttctcataaacatgaatttaaagcatccagagaataagaacgtatggaggccccatattttattttaccaccccatgctgttgggcattctagttgtttcccattgtttgttatttactataatattataatgaatatttttgaatataaaatttctatttccctttgaaataattaatgggtcaaagggcatgaatggctatttaaaaaatacatttgatgcatattttaaatgtacctctggaaggagtctatcagtttctctcttcacagtgtttctctcttcatagtttctctcttcatagcatcatttcattgtattctcatggataccgggtaatatgatgctatgaacaacttggccagttttctgggcaaagctgtcatggtttttaaaattgtttttatctttttatcttcgattgctacattattacctccataagaaatattctttttccttcccctttttaagtcttaaaaaataatcacaatacttgcctcataaaaaaattgggaaacacaaatgtgcataaaatgctaagtacctattaggaattattgtttttaagccattatggtgacaatgaaaaatcttcagaaatgataatcagttgcaaagaacataccctatgctttgatatcctaatcttagacagatgctcctggtgcccacgttgcctttattcagctctcttctgattttaaccacagtgtggtagacagttcgtgaaagctcatattcttctcttcctgccaggatgttgctggaagctcttgcagctgtctcttacattcttccccagggtctttttcaacagagatctcgcagctggcttgaattttgctgtctaaaggtgcagggatggggagggattaatgcctagaggacatccttcaaccaatgggagatgggaggtagtgaaaaaatattccaatttcctatatttctggtagacaattctgggaggcattccatgtatgcttctcagagcttctggcagagtcccactcttgttgcttacagcagaaacctcagtaaagcaccatataatgtcttttctctctttgtgtctgactctcctcccttatttctgtttcctaggagcagtttggaaataaactaactgcaaccaagtctttgttctaggctcttctccgagggaaaccctaactacgatatcgtccctttccctttttctccaacaatgcagagttctttccccttcccttggagaacactcagttaattaactcagccattgcatattgagggtcaatcctatgccaggcactgctttgtggaggatgcgaagacagactcagattctggccatcttggagctatattctagtggagcaggcagaaaatgagcacaataagtaagcaagatgttagacttcagaagtgctaaggggaagaaaggaagaaaggtaggaaatgtctggggaaagaggtgcattgcaattttagataggatggccaggagaggctttattgagaaggtctcttttgcgtaaatatctgaagaaggtgagccacatcaagatatgtcggaaaaatattccatctgaggaaatggcaaatgcctgagccctaaggtaggagtacttctggaacacttaggaatattgagaagaccagtgtggatgaagggaggtgaaggagaatgaggtgctattgccagagaggaagcaaggtgatagacagatcacataggaaccttaaggtctttggtatttaccttaagttttaaaatttatttatttatttatactttatgcaaatcaaaagtgacagggaagcaatgactttatctattggagtcttaaaattgatatataatagttgtacaggcctggagcagtggcttacgtctgtaattctgcactttgggaggccaaggcaggcggatccccaggtcaagagatcgagaccatcctggccaacatggtgaaaccccgtctctactaaaaatacaaaaattagctgggcatggtggcacacgcctgtagtaccagctactcgggcggctgaggcaggagaatcgcttgaacctaggtggcggaggttgcagggagccgagattgtgccactgcacttcagtctagcaacagagcgagactccgtctaaaaaaaaaaaagttgtacatatttttggggtacatgtgatgttttgatacctgtgtaatgatcaaattagggtaattggatgtccatcacttcaaacatttatcttttattgggaacattaccattcttttcttctagctattttgaaatatacaataaattattgttagctataatttccctattgtgctatcaaatactgtaaattattccttctatctaactatatattttaagtttgatggagaattactgaagaatattgaacagaataatctcaaggtcaaaaggattattctggctgctataatagtcttcaggagaacaagggtggaaggagaagccagttatgaattatcgcaataatccaggagagagattatggtgatttgaacctgagtcttagcagtggaggtggtgagaagcattgagttctatatattctgaagctggagttgacagaatttgctgatggatggggtggagagagtgagagaggtaaggaggcatagacaattccaatgtgtttgggctgagagactaaaataattatgtttgccatttactaagttgaggaagcaagcaagaagagaagattggaggggtgtatgggagctcaattttccacatattaaacatattccctatttattactttccaggaggaatgtcaaggaaaataggtgattgcatatatgaatctggatttaagaaacaaggtcagggctagatatgtaaattagagagtcactagtatgtagatgatattttgaaaccttggaactggatgagatttgcaagggagtatgtataatagagaaaagaagaaactcaaggttgatatattaattttctagagctgtcataacaaaataccacagactggatggctgaaacaacagaaattaattttcttgcagttctgatggctgaaagtccaagtcaaggtgccagcaggggtgatttatttggaggcctctctccttggcttgcagatggctgctttctcagtgtgttttcacatgctctttcctctgtgtgtgcatatccctggtgtcttcatcatcctataaggacaccagtcatattggattagggcctctcccttattccctcatttaaccttcatattacccctttagaggctctattcccaatacggtcatattctaacatactgggggatagggtgtcaacatacacatttttagggggaacacaattcagtctataacacgtggatatcttggacattctgaaattagaatggaggggagataagaaaaaataatcaaataagactgagatggagaggacagagaggtttagagaaaaaattggagatatatgaaataaagaaagtactttgaaaaagaaaaaggaaacaattgtgtcagaggttgctgctatgtcaagtaagataaagactaaggattgaatattgaatttagaaatgtggaggtcacagttaccttgataagattagtgagtggtagagtgctgggggtgagcgtctaactggagtggattcaggattaaataaagaaagaaaagccagaagcaagaaataaagacagctctttcaaggagtttttaaaaaccaattgcctaagaacttcatgttgtagtctttaatttcagccttattaatggagaggggcaagattggtgaattcattgacatgcaggaacatggagtaagcttcacaaaattaggtaaaacttggacttcccactctaagatggtgtggcgggtagaatagcggtcttctgaaaatgtccatgccctaatctccagaaccttggataatctttgctaagccttatactcttaacagagaaatacagagacttaagatggttaaaatgaactctctctacgggaaacatccaacagagacatgttactgccctgagctctctagagggactctttctccttaactttgcttaagcctgccaagttagctttctttttgattctgtgaactaaacagaatctttccaacaaagtcttttgtttacctaagtcggccagagttgcttataaggaaagagacctaagtgacacactgttccttccatttggaatgcctcacacaacccaatttcatttcagtttcacttgctgtgtcccatctattttactttctggacttgatagtgtgatggttaatattaggttgtccacttgactggattgagagatgcctagatggctggtaaagtattgtttctgggtgtgtctgtgagggtgttgccagagagattgacatctgagttggcgaactgggagaggaagatccacccttaatgtgagtgggcaccgtccaattggctgtcagtgcagctagaacaaagcaggtggaagaagggggaacaagctcccttgctgagtcttctatttttcttcccataccagacacttgctcccacacctgcccttaaacatcagactcctggtttttcagcttttggctgggactgaaggctgcactgtcagcttccctggttttgaggccttcagacttggactgagccactactagcttttttctttccccagctcatggacagcctatcatgggactttgccatgtcgtcatataagccaattcttcctagtaaactcccttttatatatacaaatattctattggttctgtcgttctggagaactccaatacagatggggttgtctactttacctttttcctggagtcttttctttactgattgactggatggcaagtaaaaaatagctctaatttgtgcaggtgcagtggctcaggccagtaatcccagcattttgggaggtcaaagcaggatgattgctggcatccagaagtgtgagaccaacctgggcaacagagcaagaccctgacactacaaaaaaaaaaaaaaattagtcaggcatggtggcatttgcctgcagtctcagctacttgggaggctgaggtagcaggatctcttgagcccagaagttgaggctgcaatgagctgtgattgctccactgcactcagcctgggtgacagagtgagaccctgtctcaaaaaaagaaaatcgctcaaatgtactacagtgaacttccactgttagaactacagttggatttttctctcctaatacctattccagccccgtgtggtagggaaccaggaaaccaaattcatatatcctgctctctgctgatacagatagctatcaaaaggccgtaagttgaacaaaatgccttagcaaaatgagagcagtgttaaattgttctgttttagagtggtgtgtatatcagaagttgattatcacaataattctccttaataaacaacaaacctcagtggttgataacaataagcatctatttagcttatgagtcgacgggattcagctgatcaggcctgggtttgactcttctcatgtgtttactgtcagctgtaggttcagtaggtgactctgctgtccttgggtgggccctctcacaaatctaggtggcatctaaggtggccttggcggagatgactggggcaactcagttctgatccttgaatctctcatctttctcctgggacgagaggggcagcttggtcaagttcttatggcagtagcagagggtaagagcaagcaagctccaccatgcaaatgtctcaggtctctgcttgtgccacacttgtcagttgtctccttggggcaactcaggtcattctagctccagagctcccaaccagttggccaagactcactggacctgcaacagagctcacctattccctctgcccaattttgcttctccgaaagcaagtcctatggctgagtgcggaatgagagagcaccattgagctatacgcacgtggtatagagacaaggaagactgacaaactgggaccattattacctttgatctatcacagggtaacttttcttatttctttttcttctgtatttgtgttttatgatctttctacaacaaatacctgtagcttggttcataaagaaaagcttccaggcaagagcagattgaaataatcaaaaacttaggaaaaactgcatagtatacacacttggctatcacattggctaaagtacttagtaatctattgaaatttaccaaagcagctgacttgatgaatacttgggttattctcaaacttggttaagtaccccctttcctttttctattcactgtggctagagctgataaatgaatgctgaaatgtatattgctcttatagacttgaatgtactagcagcattcttgctgggattaagtgttgcatgctgtcctgacagaaacgaaactcaatgacttgtctatttctgtaagctgaatacagtgagtttggaatgttgtacaactctaagactgtgcaccaaaatgctcaggactggtgtgttccccgttgcaaaaagcttacattcaggtgaaggagaaagcaaaataaataaataaataattaattagatagctacaaatggtggtaactttgtgaaataaattaacaagagagtaagacagagaatgataggggaaggtacctcttttagatgggtgatgtggaaagacctctctggtgatgtagctcctttattttcttatttttgcataaaatttttagagtgtgaggcatcatcatgatttcagagacatgaggcatgtaacttgggacaaatacatgactgtatttggttgaagatgtttgtcatttttgcattgtgccctatggctaaaatgttctgattttgatcatgaaacaaaattcaccacagttatggttcaattgtcaaggaagaaagaaatactacatcaccagagaggtctttccacatcacccatctaaaagaggtaccctcctctatcattctctatcttactctcttgttaatttctttcacaaagttaccacgatttgtagctatttaattaattaattatttatttattttgctttctccttcacccgaacgtaagcttcttgcagcggggaacacactagtcctgttgatagtgacactcctagagtccagcacagtgcctgtttattatatgaatgaagatgcaccgtcattgaaatattacacttaggaaccatatgtattaattacccaattcacctatttaaaaaactcaatggttataaaagtaacaacacagtttttttcctgctaaaaatagacacttgcatgtctgctagaggctccgtttaaaaatactttcaatctacacttggttaattataaataatattcactctttagtagtggtgggggttgtatgatcagaatcagaagtgcaggtgattctaatacatttatgaagaaataactctctgggattcatggtaattgatgtactggcacggtaaactttccaaggaatgttgattctgaagaaaatctgcagctggcgcagtggctcacgcctgtaatcccagcgacttgggaggttgaggcgggaggattgcttgagcccaggagttcaagatcagcctgggcagtataacaagatgcccatctctttaaaaaattaaaaaattagctgagcatgttggtgtgtgcctgtagtcccagccactcaggaggctgagtgagaagatagcttgaggcccaggaatttgaggctgcagtgagctatgattgtaccactgcactccagcctgggtgacagaggaagactctgtcttaaaaagtaaaggaaggaaaatctgtaactcacaatctattcaataaggtactgttccgttgtttgtattgattatatgggcagacttaagagaatgtgtttgtgtgcaggcagtgaggtagtgtttgcatgtgtttgtgtgggtgtggttaagattatgtgaaaacagatgaaaaggttacaataagaaaacattagaaaatccactgattcttttttcttttttttctttatatactttaaattctagggtacatgtgcacaacgtgcagttttgttacatatgtatatatgtgccatgttggttcgctgcacccattaacttgtcatttacattaggtatttctcctaatgctatccctcccccatccccccaccccatgacaggccctggtgtgtgatgttccccaccctgtgtccaagtgttctcattgtttaatttccacctatgagtgagaacatgtggtgtttggttttctgtccttgggatagtttgctgagaatgatggtttccagcttcatccatgtccccacaaaggacatgaactcatccttttttatggctgcataatattccatggtgtatatgtgccacattttcttaatccagtctatcattgatggacatttgggttggttccaagtctttgctactgtgaatagtgccacaataatcatatgtgtgcatgtgtctttatagtagcatgatttataatcctctgggtatacacccagtaatgggatcactgtgtcaaatggtatttctagttctagatccttgaggaattgtcacactgtcttccacaatggttgaactagtttacagtcccaccaacagtgtaaaagtgttcctatttctccacatcctctctagcacctgctgtttcctgactttttaatgatcgccattctagctggtgtgagatgctatctcattgtggttttgattttcatttctctgatgaccagtgatgatgagcattttttcatgtgtctgttggctgcacaaatgtcttcttttgaaaagtgtctgttcatatcctttgtccacattttgaaggggttgtttgactttttcttgtaaatttgtttaagttctttgtagattctggatagtagccctttgtcagatgggtagattgcaaaaattttctcccattctgtaggtctcctgttcactctgatggtagtttcttttgctgtgcagaagctctttagtttaattagatccgatttatcaattttggcttttgctgccattgcttttggtgttttagtcatgaagtccttgcccatgcctatgtcctggactcattttttttttttctcaaggaacaaaaaagaacagtcaaaagcaccttgtcattgtttaaagctaatttgttttaagctatggtgtctcttattcaagagtgagaagtttcaagaagcaatttagataatattttttcttagtcttaattttgatctaaagttttctgatcaacagtacccaaataatattcaatgctgggtagtgacccaaagatttctcacagaaagcctggacagttagcaccttggataacccgaggctgttgttctgttccacatttcctccttgaatttccacattgaggagcacaacagaaatttattttctcacagttctggaggctggaaatctgagatcaaagtgtctgtaggttgagggccatagaggaaggatctgtccctggcttctctcgttgacttgtaaatgcccttttccctgtgtgtcctcatatcgtctttcttctgtatatttctgtgttcaaatttccccttcttgtaagaatatgagttgtattggattaggtcccacctaatggcctcattttggcttacatacttctttaaagaccctgtctccaatatggttacattctcaggtactagggattaagacttcaacatatgaattttgggggtctcacaattcagcccataacaacctgtcttcatcagagtctgtttgccctcaggagccaattctaaatacagtgataaaataaggttcatgacctctttagcaggagggagtggcctaagttagtcagtctgggttgagactccaagacccacatatccacagagatgggatcttctccaagcccttttgaattttctaaatcttgacatctgttccttctcatcggtttctgaacgcatgttccagcttccatatattgtagtctatctgggtggtgactaggtagtttgcttagctgttaaaaaacctctctctccttgggtagatgctttcatctagggttgaacatcagaatcattatagaggtgcttcagaaaaaaagacaaagaaaagatgtacttttattcaaccaagtaaacaaacaaacaactttacaaatgagattctgacacaaattctaattaaagaccaatacctcccctactaccaaatgttgcctgagatcttacaccaaaaagagtgactagcattgtcacttatgtgttaatgagcagcaccaccttcaagaagttgctactggagtcaccacttagatggcaattaaatattaacaacaattaaagttgagactagcttcaccacctccctatgcaattaaataataatgactgttaactacatgccaatcataactctacaaggtagatattattattattttatattatatttttgagacagagtctcactctgtcaccaggctggagtgcagtggtgcaatctcggctcactgcaacctctgcctcccgggttcaagcaattctcttgcttcagcctcctgagtagctgggagtataggcccgtgccgccacacctggctaaatttttattttcagtagagatggggtttcaccatgttggccaggctggtcttgaaaccctgacctcaggtgatccaccagccttggcctcccaaagtgctaggattacaggcgtgagccaccatgcctggccggtagatattatttttaatccctgtttttcagataagaaaaataagtcttaggatgtctgtcttagtctgttcaggctgctgtaacaaaataccataagtggggtaatttataaataaaagaaatatattgctcacagttctgtagtctaggaaattcaagatcaagtcatcagcagattcagtgtctggtgaggaattttgctctgcatcatagatggcaccttcttgctgtgtcctcacgtggcagaaggggcaaacaagttttctcagggttcttctctaagggcactaatccaattcatgaagggtttgccctcatgatccaatcacctcctaaaagtcccacctcttagtactatggtgctgaggattagtgttcaacatgtgaatttttggaggaaggaaatattcagaccatagcaatgtctaagtagattatttaagtcacataactagtaaatagttcacatagtgtttgaatttggatgtgcctaaaatttaagcacaaccttcaccaccttgctatactgctagctgttttcctctagcttgtgtctatagccaagtggttagtcctaacctagctaggctaatttctgacatccagccccaccttgccagaccatttggaatcagcatgtcttgaggaaaacgcctccatgatatgacacagctactgactcctgtaaaaagtctagccctcagcttctgctgttcttttgtgttcttgtgtctggcttgctacattttgtcctactgcctatgctttgcattttaaagactgtcttctaaaacacctacaaaattttcaggaggactaaaattttcatttccaaaatactcaatgagtattttatattataatttaaaatgctttcaatagtcagctcttaggaaaatctggctcttagtgcagaaatggaggatgtagcagacatctgttcaattacagtattgataatagaaaagcttttaaaaatctacacctcataatatgttaatgcagggaaatacttcttagcagtttttatagaatcttgtcttttgcacaataaaaggcaattctccatttcaatgcagatattgagtaaatgaaaattgcctttttaaatttgagaggacagaagaataaagatatttggcttgagataattgcttacactgttggtgaaagctaaagttgtttcttataatgcaataatgactgcattttaaataacacagatgagtttcactctatgcatagataaatagttgtatggaaatcaaattttcataaatgaaattacactttaaaaacacaatactcataagttacttataatttttgtagcaaaatttttttgtaaaaataattgctcagtattcactatataacttcagctatttaattatggtaagaaatttttttaaaaggaggcagagcatgatggctgaatagaagcctccactgatagtcttccctgtaagaacaccaaattgaataaccatccacacaaaaaagcttcttcatgagaaccaagagtcaagtgagcaatcacagcacctggttttaacttcatatcactggaagaggcactgaagaggatggcaaagatagtcttgacttgctgatgccatgtcttctccatcctctggcagagaggcatctgtgcacttgaagtggcgctgagagagcatctgtgcacttgaagggagagagagtgtagtgattctgggacatttaattggaactcagtgctgacctatcacagtggaaagcaaccctgggcagaactcagtcagtgctgatggagggagcatttagaccaaccctagccagagggtaatcacccttcccaatggtcagaacctgagttctggcttctggcaagccttgccactgtgggctaaagtgctctggggttctaaataaacttgaaagtcagcctagaccacaaggactgcaattcctgggcaagtcatagtgctgtgctggactcggagccagtggacttgggaaagcatgtgaaatgccgggtcagcctagggactccttgtaccacccttaccccaaccctagacagcacagctcacacctctaggagagactccttccttccacttgaaaagaggaaaagagtaaagaggactttgacttgcaacgtatataccagctcagccacagtaggatagggtaccaggcagagtcttgaggcttctattataggctctagctcctggatgacacttctagacacaccccgagccagagggaaggatctagtcctggcaggattcatcatctgctgactaaagagttcttgggccctgagtagtcagcagtggtaggcaggcagtacttgcatgcgccttgggtgaaactcagagatgtattggcttcaggtgtgacgcagcacattcccagctgtggtggctatggggagagactcctgcttgagaaaaggagaaggaagagtaaaggggactttgttttgcagcttaagtaccagctcagccacagtggggtagagcaccaaggaggctcttggggtctccaatttcaggccttggttcttagatggcatttctggacttcacctggatcagagggaagctcacagccctgaggagagagtcccaggcctggcagcacaagctgattgaagagcctttgggccttgagtgactattggtgatagccaggcagtactgactgctggcctggggtagtggtggccattgagagactcctctgcttgtggaagggggaaagaagagagggaaggacttggtcttgcggcttgagtgccagcttagccacagtagaagagggcaccaggtagatttctaagatttctgactcgaggctttggatcctggatggcatctctggaccctctcagggccagtgggaccttgctcccctgaagggaaggacacagcctggctagttttggcaactgctgattgtaaagccctaaggtcttgagtgaatataggtggtagtcaggcagtaggtactgtaagccttgtgcaagacccagtaccaggctggcttcaggtctgacacagtgctgttccagttgtggtggccacaggggcttgtgtcaactctcccctagctctgggaagctcaggacagagtgagagagactatttgattgagagaaagtaagagaagacaacaagagtctttacttggtaatcagaattcttctggatcttgttgaagataaggtggtatctctgcaagagccaccgtgttacttgagtaaggatgccccctaatgcaaatatggctgcagtgaccaaaaccttagattataacacctaagtctcttggaatatccagaaagccttcccaagaaggatgggtacaaacaagcgcagactgtgaagattacaataaataccaaagtctccaatgcccagacatcaatgaacattcacaagcattaagaccatccaggaaaatatgacctcaccaaaatcaaccaaataaggcagcaatgaccaataatggcagagatatatgacctttcagacagaattcaaaaatagttgttttaagaaaacgcaacaaaattcaaaataacacagagaaggaattcagaatcctatcagatacatttagcaaagagattaaaataattaaaaagaatcaagtagaaattcgcaattgaaggccggacacagtggctcacacctgtaatcccagcactttcggaggctgaggtgggtggatcacttgtggtcaggagatcgagactagcttggccaacatggttaaaccccaccactaccaaaaatacaaaaattagctgcgtgtggtggtgcatgtctgtaatcccagctacttgggaggctgaggcatgagaattgcttgaacctgggaggcagaggttgcagtgaaccaagatcacaccaatgaactccaacctgggggacagagtgagactttgtctcaaaaacaaaacaaaacaaaaaaaagcaatttgcaattgacatgctgaagaatccatcagagtctctcagcagattttttttttttttgttaaatttttaatttttgtgagcatttagtaggtgcatatatttatgggacacatgagatattttgacggggcactcagtgtgtaataatcacagggtaaaggggcatccatcatttccggcatttatcctttgtgtcacaaacaattttatttatttatttatttatttatttatttatttatttatttaagatggagtcttgctctgtcgcccaggctggagtgcaatggtgcgatctccactcgctgcaagttctgcctcctgggttcatgccattctcctgcctcagcctcccaagtaactgggagtgcaggcacctgcaacaatgaccggctaatttttgtggtttttttttttttttttttttttagtagagacggggtttcaccgtgttagccaggatggtctcgatctcctgatcttctcgtgatccacctgcctcggcctcccaaagtgctgggattacaggtgtgagccaccacattcggacttctttagttatttttaaatatacaatacattactatgggtgtagtcaccctgttgtgctatcaaaattgtaaatcttagtatcaaatactatatcttattcattctatctgattatatttttgtatgccttaagcatgctcacttcccgccactccccactatccttcccagtctctgttaaccatgattctacactctatcttcatgagttgaattgtattcatttttaactcccacaaataactgagaacatttatcagcagaattgattaagcagaagaaagaattagtgagcttaaagacaggctacttgaaaatacacagtcagaggagacaaaaaaaaaaaagaataaaaaagatgaagcatttctacaatagctagacaatatcttcaaaagggcaaatctaagagttatttctcttaaataaaaggtaaagagagatagagtagaaagtttactcaaagggttaatatcagagaatgtcccaaacctagagaatgatataaatattcaagtacgggaaggttatacaactcgaagtagattgaacccaaataagactacctcaagatatttaatgatcatacccttgaaagtcaaggataaagaaaggatcctaaaagcggcaagagaaaagaaacaggctgggcatggtggctcacacctgtaatcctagcattttgggaggccaaggtgggtggatcacttgaggtcagaagtttgagaccagcgtggccaacatggtgaaaccctatctctactaaaaatacaaaaattagctgggcgtggtggcacattgcctgtaatcccagctacttgggaggctgaggcaggaaaattgcttgaacccaggaggcagaggttgcagtgagccaagagcatgccactgcactccagtctgggcaacagagtgagactccatctcaaaaaaaaaaaaagaaagaaaagaaagaaaagaaacaaataacatacaatgaagtaccaatacatctgatagcagacttttcaggggaaaccttgcaggccaggagacagtcgaatgacatatttaaagtgatgaaggaaagaaaacttgtacgctggaataatatatccagtgaaaagatccttcaaacatgaagcagaaataaagactttcccagacaaacaaaatatgagagactttatcaccaccagaactgtcttacaaaaaatgctaaaggagttttttaatctgaaagggagattaatgagccataataaatcatctgaaggtacaaaactcactggtaagtacatagaaaaacacagaatagtataacatattgtgcatagactactcacatcttaagtggaaaaatatgagtgtgcatatgagtacataaactaatcatatcttaagtagaaagaccaaaagatgaaccaataaaaaataataactacaacaactcttcaagacatagacagtacaataagatataaataaaaacaacaaaaaattaaaaagtggagggacaaagttaaagtgtagagtttttatgagttttctctttgcttgtttgttagtttgtttatacagtcagtgttattaaaataaagggctataagacattatttgcaagtctcatgataccctcagatgaaaaatatatagcaaatcacaaaatataaaagcaagaaattaaaacataccaccagagaaaatcaccttcactagtatgaagataggaaggaagaaagaaggaagagaagaccactaaacaaccagaaaacaaagaacaaaatggcaggcataagtccttacttatcaataataacattgaatgaaaatcaactaacccctccagtcaaaagagttagagtggctgaatggatgaaaaaataagacttaacaatctgttgcttacaagaggaatacttcacctataaagatgcagataaacttaaagattttctgtgcaaatgtaaaccaaaaaataaggaggaatagctatgcttatattagacaaaatagattttaagacaaaaactataaaaagagatgaagaaagtcattatatatgataaaggggtcagttcagcaagaggatataacaatttgaaatatatctacactcaacactagagcactcagatatataaagcaaatttcattagtgctaaaggaagagctagatcccaatacaacaatagctggagatttcaacactcaatattcagcactggacaaatctttcaaacaaaaaagtcaacaaagaaacattgcacctaatctgaattatagaccaaatggacctaatcgatatttacagaatattttcttccaacaaatgcagagtacacattcttctcagcatatcgatcattctcaagaatacaccgtatgctggatcacaaaacaagtcttaaaacttcaaaaattgaaattatatgaagtgtcttctctgaccacaatggaataaaactggaaatcaacaacaagaggaatttttggaaactatacaaacacatggaaattaaacaataagctcctgaatgacgagtggatcaatgaaaagattaagacagaaatttaaaaatgtattgaaacaaatgataaagaaaacacaaaatatcacaatctatgggatacagtgaaagcagtatgatgtggaaggtttatagctataagtgcctatattaaaaaagtagaaacactttaaataagcaatctaacaatgcatcttaaagaactagaaaagcgaaagcaaatcaaaaccaaagttaatagaagaaaaaaataaagatcagagtagaaataaatgaaactgaaatgaagaaaaaaatacaaaagatcaacaaaacagaaaatggttttttgaaaagataaaattgaaaaacctttaaccagacaaagaaaaaaaaagagaagaccaaaataaataaaatcagagatgatgaaagagacattacaaccaacatcacagaaattcaaaggattattagaggttactatgagcaagcatatgccaataaattggaaaacctagaagaaatagatgaattcccagatattacaacttattacaattgatctgtgaagatattcaaaacctgagcagaccaatatgtaatgagattgaatctataatgaaaaaatttgtcagcaaagaccagaatccagtggctttattattgaattttatccaacatttaaagaactaatacccatgctactcaaactattccaaaaaatagaggtggaggtattacttccaaactcattctatgaggctggtattccctgataccaaaaccaaacaaagacacatcaaaaaaagaaaactacaggccagtatccctaatgaacaatgatacaaaaatcaaacactagcaaacaaaattcaacaacacattaaaaagaccattcatcatgaccaattggtatatattccaggaatgcaggggtgtttctacatacataaattaatcaatgtaatataccatatcaacagaatgaaagacaaaaaccatatgatcatttcaactgatgctgataaagcattagataaaattcagcatcctttcatgaaaaaatcctaaaagaactgggtatagaaagaacatacctccactcaatagtagtcatatatgacagacccacagctagtatcatactgaatggggaaaatctgaaagtctttcctctaagatctggaacatgacaagaatgcccactttcatcactgttattcaacatagttctggaagtcctagctagagcaatcaaaaaagagaaagaaataaagggcatccaaattggaaaagaagaagtcaaattatccttgtttgcagatgatattttcttatatttggaaaaatctaaagacaccaccaaataactattagaactgatagacacattcagtaaagttgcaggatacaaaatcaacatacaaacatcagtaggatttccatatgccaacagcgaacgatttgaaaagaaattgagacagtaatcctatttaaaatagctgcaaataaaattaaatacttaggaactaagttaaccaaaaaagtgaaagatctctgcaatgaaaatataaaacgctgatgaaagaagttgaagaggcacaaaatattggaaagatattccatgttcatggattggaagaatcaatattgctaaaaggtacatactacccaaagcaatctatatattcaatgcaatccctacaaaatacatatgacactcttcacagaaatagaaaaaataatctaaagtttatatggaaccacaaaagacccagaatagccacagttatcctgaacaaaaagaacaaaactagaggaatcacattacttgacttcaaattactacaggtatcgtaacaaaaatggcatgatactggcataaaaacagacatttagaccaatggaacagaacagatattccaggaacaaatctacgcatttacagtgaatttgttttcaacgaaggtgccaagaacctacactggggaaaggacagtctctttaaaaaatggtgctgggaaaactgaatatccatatgcagaagaataaaactagactcctatgtcttgccatacagaaaaattaaatcaaaatggattaaagagttaaatctaagtcctctaattataaaactactgcgagaaaacactgaggaaactctccaggactttggatctggcaaggatttcttgagtaataccacacaagcccaggcaaccaaagcaaaaatggacaaatgggatcacatcaagttaaaaatcttctgcacagcaaaggaaacactcatcaaagtgaaaagacaatgcacagaatgggagaaaatatttgcaagctatttatctgacaagggattaataaccagtatatataaggagctcaaacaactctataggaaaaaatataataaatcaatcaaaaaatgggcaaaagatcagaatagacatttctcaaaagaggacatacaaaatggcaaacaagcatatgaaaaggtactcaacatcactgattatcaaagaaatgcaaatcaaaatttcatgagatatcagcccagttaaaatgttttttatctaaaacacaataacaaatcctggtgaggatgtggagaaaggggatctttgtacactgtttgtgggaatgtaaattagtacagtcactatgaagaacagcttggagtttccttaaaaaactaaaaatagagctaccacaagatctagcaatcacactgttaggtatatgtccagaagaaaggaaagagatctctgcattcctatgttgttgttgtttttttaaatttatttccaactttcattttagattcagtgggtacaggtgcacatttagtacaggggtatattttgtgttgtaggggtttggcgtccagatttttttgtcactcaggtaataactatagaagtcaataggcaatttttcaatcctcagcctcctcccaccctccctgctcaagtaggccctggtgtctattgttcccttcttttgtgttcatgtgtactcattgtttagcttccacttagaagtgagaatatgctatatttagttttccattcctgggttaattgactaaggataatggttttcggctctgtcagtgttgctgcaaaagacatgatttcattcctttttatggccaggtggtattccttaaggtataggtaccacattttctttatccaatccactgttgatgggcatttaggttgattccatgtctttgctattgcaaatagtgctaccatgaacatacatgtgcatttatccttatgatagaaaaatttatatttctctgggtatgtacccagtaatgggactgctgagttgaatagtagttctgttttaagttatttgagaaatctccaaaatgcttttcacagtggctaaactaatttacattcccacccccagtgtataagcattcccttttcatttcaaccttgccagcatctgttattttttgactttttaggaatagccattctgagtggtgtgagatagtatctcattgttgttttgaattgtatttgtctaatgattaatgatgccaagcattttttcacatgtttgttggctgagtgtatgacttcttttgagaagtgtctgtttgtgtcttttgcccatttttaaatagggttgtttgactacagtcaataataatttgttgtacttttaaaaatacgtaagagtataagaataattggattctttgcaacacaaagaaagggtaagtgcttgaggtggtggatacaccattttccctgatgggattattatgcattgtgtgcctgtatcaaaatatctcatgtacctcatcaatattcacatctactatataccccccaaaatttaaaaaagaaacacatacaatatacatataaagtacacatatatatcttatataactttgggagaaaaataatacttaaaaataatgtttctaaaaattttaaatttctaaaattgtaaatataaatgtttgatatttgaaaaataaaggtattgaattacatgaactaataatatatcattatgactcgaagtgggcaaaggctagcaaccataaaaggagaaaatagaaaacagcttgttaactttagttaaggacaattttatacttttattcaaacaatcctatgtagggttcaatgtctttcttaggaagttttggttgaacagttttgtcctctatactgtgctatcatattccataaagtatttctgttgaaagaattttcaactctttactgagtcaaaagttgaatgtcatactctctttctttaaaattgatccaaaccagttctctgtcatgaattaagattaaaactttcaacgctctatcctatcttttggttaaataaatgaatgggtgatgaataaatatagggtggttgccatggcaaatctttaaaaaaattatctaattatcaaagtcaaatcagatttttaaaagtaaaaaggtcttttacatctgtaagacacaaagtacatgtatattgttattgttcttaactagctagagattagatattacattatctcaaatttattgtaataaataaatggagagttgcattcattttaatttacaaacattttagtgggttcaatggtggtcccccccaaaagatgtgtccatatcataacaccaaggatctatgaatgtgaacttatttgaaaaaagggtctttacagaaataattgagcctctaactgagaacatcctggattttctgggtggctcctcagtccaatgacgagttccttatagcagaagtagagacccagagatccagaagagaaagctatgtgatgacagaggcagagcttggagtcatgcagccacaagccaaagaccacttggagccacctgaaactgcaagaggcaaggaagagctcttttctagagggagtgcagccctgggcgtattgccctagtagcaccttgattttggacttctggtctctaaaattgtgacagaataaatttctgttgctttcaggtactaagtttttggtaataagttgcagcagccttcggaaactaatacatatatcaaataggcggaggaccagtatgccaaagaaaggaaatgatttgttggctcttcatgctgagtagggaggaagaaaacaagctatccagtatgttcatctccactgctctcctctaaaaggagataagtctctaccagtctctactatcaagatataaaatctttaattgttaattttttattgagatataacatctatcatataaagtaccaaaatctcaggtgatactttttgcatatatatttatgtattaatatgttcaagtttctacacacacatacaattgtgtaacagtaaccaccactcagatggacacagaacatttccagcataaaagaaagttccctagagtccatatcctgtcaaaacctacctatccacaatagcctctgaaaacaaatacttcgattttaatacaaaaattagccaggtgtaatgatgcatgcccctagtcccagctacttgggagactgaggtgggaggattgcttgagcccaggaggtagaggctacagtgagctgtgatcacatcactgcactccagcctaggtgacacagtatttgtgacagggtcacctgtctcaaaaacaaaacaaaacaaaacaaaaactcattctattattagcagaaatgggatcatacagtttgtatttctttgtgtcattatttgtccgtaatgtgttatttgtctgtatatgctcattattatgtctgtaaaaatcatccatgttaattgtattaatcaataggtctttttctgtttaattagggaggtgaatattccacaaaatatttactcttctcttaacaaacagttgggttgtttctagttttaagcaattgtaagaaaattgctaagaatattctggtcttatatcttagtggacatatgtgtttatttttcttgggtatatatgtaagagtgaaattatttggccatagggtaggcatatatttagtttttatagtactattaagaactgttccaaaattattgtatcaattcacacttccatcaacatggtatgagagttccagttgctccacattcttgctgacacttacaattgtttgccatttaaattttagccactggtgggtgtttagtggtatcttattttgtgttttaatttgcacttccttattgaataattatgttgcgcatcttcccttatgcttgggctattttaataacctcttttatcaaattcctgtttgagccttttgcccatgaaacaattttttttgtcctttatattattgaaaattcctttctgctttagtgaatcaaggacataaatagtcagtctttcatgggtagaatttaatttttctgtgcattggtctattcccagagagctttaaatcttgcttaattgtgctcacctttttatacatcatggattttgactctggttctttcgtttttccatttcattttagtcaccaaaatgcttaaaactagagatcaactttcttagctgcaaaagcttctagcctttcaagaagttcatactttatgaaattgcacattaagcatttatttttcagaccatttttgaacattactcctaaattaataaagtattctgatactgctttagtattgattacagtaaaaagggtttgaaatatagctgttctttatgcataaaatacccagctaggaccagtactgccagagaaaaacatcgtattgaatggccatttccctacctaaaagatgtctcaatctgaatttatttggctacactaaagaatgcagtatatttagttttccatttgcataatgtgtttgtgctatagataatattttaaattgaaaagtttgttttaaattatttttacaatgaagactgttttcagctctttttatattgtgcatagtttttttatgtaatctactagcatgtgttttttgtagactgtttaatgactggatatcttcctccaatttttgaagtacaaaaccagtgtattttacttgtacactgttttaaaatctattaaaattgtcatttgacttttttctgttaaaatatactttctgaatacaaagctattattacattgtcggatatcagaatgcataatcctttggatgagtatataagttatacatttctgcagattgatcaattaaatattaatttatagtaatataataactgtaatattattatagtgatggtattgttaataatagtaattgatgagagaataaaagatttatatcttttattgttaaagttggacaccaaaaattaatgttagacagctgccctaccctgctccaactgctcagaatttccattcttcatccagtgggattttgtaaactccatagagactcttccatatttttttctacttttaagttgttgtttatttatttccttaacacatcatatatgttattagagaataaagcaatcgtaagtaattaagagaataaactgtttcttggttgttagaaatatcctggggccaagagactcatctcctatttaaaataatgtattgtgaacattcagtattgtgtattatagaaaaataaattcctgaggaataaataatttgcttttaatattaaaaagctttatcttcctaactaaaaaggttgatactaaaaagccagaacccagatttttccccttctagcttttttttagtgtttttttgttgttttaatggggagaaagagagaaattgcctaatactgattaaagcatatggccttatcttaggagcagtcccaaggttttgacaaaaaatataaaacattaaaaataggactttatgtgctacttttttgggcttggctggaggacaggacaaatacacagtggttttatgagcccccctggtgtataatatttatcttatttgctcttcatttatatttagtgcatgttgtaaaactgtgtaaggctatgaggtaactttagaagttataatgggcaacagctcttaatggagacttttcaaaaaatttttgtttacagattcactttgaagagtattaaagacacattcagctgaataaagcagactctatgtatcataggcttaattcatacatgtaataaaatctttccatgtgcttgcagaaataacacaaagatcaataaccggaaggaagccagagggatgaaaatgcatggtagatgaagattgttttgcacaagacaagagaaagaatatttaaagcttgctgacagattaatatggtctgctttacattttgtctgctatattacaaaatagttgcatctattctcagaattttaatcaaagccactgaaggagaaaagtgggcatttagaaaaatgaacctactgtttggctaaggatcttcagcaaagtagtacattctcaatagcatgttattgttcgttatttcacaaagacctcatcttcaagttttgttgggcaactagatgtgtagcctgtgaagttctgataaataatgatggtacatgatgataccaatttctttaattcttgcctttaaaagatgttgcaacataaaacaatacaataactggttcttgatatatttggcgtttaaaaaatacacacttagtggaaatcactctagacatttaaaagtaacgttgaccttatgaatatttgcatatgaaaagtgaaaaggatcatcttaagtgcagtagtgccccactgatagcatgagttaggacagttggtctggatggccttgtgagtatctcctgccttcatcacccctccacctgttcttcccaaagctttgcaagagatatcaagagacttgagaaaatatttgcaagacaaggcagaatctttggtcaaggacatggagattgggcaggctaagtttagcaactcaactttagtgatcaatggcaaataacaccaggcctctccatgttaagaagtgattgtgaatttgagatgccagagagctcatgcttggttaaaggagcaactattgctcaattccaatgtatgattttcaatcaatttccaagaatttccttgtgtttaggttctaaacagtctactgttaaaaccatgggtacacattggatgttatggtaatacaaaggaaatggttagacagtatacccatttatggaagttcctgtggtccacctacaaaacacaagttgacaatcacagtggctgctgtcgtcaatcctgggctgttgtgcgctgcagtattttcaccctggccattcaacacagttcatggacatcatgtctttccactgatacttttttaaagatagtttttatataaccaaatccttattccgtttacaatgaggtgctataaatgaattacctgaaattatatgtttgtctgttatctttcactatttctacttcacattaatttttagctataaaattgataaaccgatgcttagtaatatctctttccttcttttactctttggttttcaaattttatttcaatgccagagaatttcatttactaggaacaatgtattacaacacatttaaaaataaactacttaaatttggatgccaataataacaatacaactcaatggaacttgagttgttaaactcagccttcctgcagtttgataattgtatttcagagctacctcaccatgaattccttgcaaattttttccctgtagacaaaattaaaactgaattcaggaagttccagggggctttgtacttgttgttaataatgttattgctttattgatcaaccgtgtgggtagaataggcataatttttagcacacttaacctattgtcaaagtcaagatcctaaagccttccagcaacatcataaacttggttttaaaatatcccttttgaaaacattcattgaaagagcacctgctgagagtcaggtaacaggaagagttataaagatgtataatatgcattctccaccttcacagtctagtgaaggtgatggtggatacaatttaaatgcagtcagaaaataaaggtcatgtaatatagcatatttcatacattaataaatgattttatactttgaacaaactcatttcaatatttattttagtttctaactatgtaacaatttcaaacaactgagtattttctcttaacactgaaatttctaatgtcttatgtactgtcaatgtgaaattcataatactgactccacttatcccccgtgctggaatgcttatatattgaatagtgtttggatttgacaattacattggtaattgtcttgattccaaggaaagcatagaaacatttttaaaaatgtaagataaaaaaatttaggagataaatttaatcatttcttatgtttttacagtcattgtctttcactggctctgaagtgaatagcaacaaacatcctttactcctggtcttgatactagttctgactaggatggggaggaaattgggagttttttaaatagtttctctaggaagcagaatgtaattataacaggtactgtcctggcaatctttgtacttgagaaacctgtgaatacctgtgttgaagtagcccagatcatggggttggttttgtgccacccccatgtggctttgtgccactctgtctttggcactccagtgtcctgtagtgccagaaacccaatcctgaattccaatctgtgggaccaagaccctgatattttcctaatggtgcatatcatccttcccatatgaccggcaacctgttacccctctctgagcatcatcaggaacctgacttgtcatgtatcctcctctttggcccatcccatctctttttcttctttttctttttcgagacagagtcttactttgttgcccaagctggagtgcagtggtatgatcatggctctctgcaaccttcacatcccaggttcaaaggatccttccacctcagcctcccgagtagctgggactacaggtgtgtgccaccacacctggctaatttttgtatttttttgtagagctggggtttcatcatgttgcccaggctgttcttgaacttgatcagcctgccttggcctcccagagcatctcatcttttggactggaccttcttgagtacttggacctatgtgaaccaggctgactcccctatctgacttcgaaaaaaaaatacgttaattttttggctactcctacaaaagggttgagtatccagtactctttaatgtggaattctcctcccttctctgggtgatagtgaggccatcgtgttctgtgttgtaacctgtctgagactcaataatatttgcgtaaaagtccacagtattttagagctttttagaacagaattagaaccctggaactaccagttgagtggatctcccaggatatcatgcagtctcactgccacaggactacattaaggaaatgagcaaaattgcaaggtcaaaatcatttggcaaggaattcttttcctttgcttacatctaattggtctctagccatgagatatgctcatatagaattaacttcagattttaaaaatatgggaaatgtgagttctggttttaattgcttccttggcaattaaacgtctctactgggaaaatataaagttaaatacatagttactgcaggtatcatcattttggaacttgacaatattgtgcacactgaagtgatcacagttgaactcacatctcttatttgcgtttcggtaccttttcacacaacttttcgtctcgtaaaaaggtggtcgttgaaaattttgaagcatgacttgaaagctttacaaattattgttatgactttgagaagaaaaaaaagtggaaaatatttttaaattaggaaacccatggctttaaattaaaattttgggattctcgtccttatagcactgctcttgactaatctaaatacctataataatactgggtttaaatgtgagcccttctctggcgcacagggggaattgattagaacgattaactagaggcattttccttggattttattcttggctccaacatagattttattggatcctcttcctaagccaccatccattgtgttagaaacatatatcactcactgtagctaggcagctgtgaaatgaagcatgggatcaactctgtttttcactctgttgaggaaaaaaaatcatttttaaacctcttatttcacattcttataacttttggggaaaaacattctaccccccttggaagttatagtttctcagtgtcattttcagacccgggtgatcccctcttctgacacacatataattatgttctacattctgaggatttattgagtgtattgccaactggtctttaaaatacattcttcaaatcctgcttttgcttgaataatgtcatctctatcttcagcatatattaataaccggaatagtaaaagaaatttgcctaagaagtaagttatatttaaaagctatttgatgctatgtatatgatattacctggtgatatggtttggctctgtgtccccaccaaaatctcatcttgtagctcccataattcccaccttttgtgggaggaacctggtgggagatgattgaattatggggacagatctttctcatgctgttctcatgatagtgaatgggtcttatgagatctgcttgttttaaaagtggagttgccctgcacaagctcttttattgccaactgccatccatgtaagatgtgacttgctcctccttgccttccgccttgattgtgaagccttcccagccatgtggaactgtaagtccaataatcctctttcttttgtaaattgcccagtcttaggtatgtctttatcagcagtgtgaaaatggagtaatacatctggcatttaaaaaaagtactatatttattgcatataagtgaaaatttataaaactaactatattagtaaggatagaataggttaggcttctatgaaaaattagccctggaatctggtttaagacatacaatgaaggttaaagacaaaagcagatttatgtaatgatcatataaattctgttaaggctcagggagcttttcagagtagctcctctctctgtgtgatgacctctttctctgtgatgagaggtgaggtcacttgcttcttgtggtatttccatttcaacacatggtttctacagttgcctgttatagagaagataggttcttgaatgtctcagcctggagctgacctgaatttcttctacttagttttcactgcctagaaccaggtttctcaactatggctggggtgaataatttgttttgggggactctccttgcactgcaggatgcatgccagcatccctggtgtctatacaccagataccagaggtgtcccctctggctgtgataaccaaagatatctctagaggttggggtgagggcagcagtgaatggaaaaattgcttttggttgaaaaccgctgaaccagaggtagtcatttagttctaactgcaaggttgttgggaagagtggtcttcttgtgtttacaggaaggtgaggaaaatcagacatggatatgcactagtagactgcaacatattagctaacggaaatacagacttttcatcatttcactatgtatctaaacatatgaaaaatgttactgtgcttcaattttaacataaaacaaaacaaataatactgcatgtccaaagtaaatttaacaactctgagcaatgaactaaattttattaaattgtagaaagaaacatttgtagtaaaaatacattaaaggaaacatttaaagaagttgaaataataattattgtatttgactataggaggcttaggaaaaacactagcaaataatttaaatatgagcattagaaggaacaaactagtgtgactatgaaaacttgtttagcatctctgaacgtatgtttaatattgaatataatttgttattagccattaaaacaacctcttctgggatagcctagttcaatgtatacttgtttacacatgttgaccttggtaatatgctttgtaaatgtgttgtcaagttgtatttattagtcatggactaaagaatatctattagtcacaggataattagaatgctttcagttataaggctagaaacctagtggaaccttcttctggcagacacacagagagagagagagagagagtgagagaaagacagagagaaaggaatttttcagaaagagtttttgttttacaataacaaagctttgtttattgttcatgttacattttggctttagctctcctccacatatcttctcattctggggcacagtttgaaggagcagcccctatctcagacttgtggaagaggaaaaaaataatcatagaacaagctgatggatcttatggtctctacttgggcgtatcatatattccttctgcccatattctatcaattaaagcaaaccatatggccacgcatgctgtctgtcaaagggtgagagaagtatctccttccacagggaggtgctgccagtgacatgaccataggagggatataggtcctcttacagagaggacaagagataattgtgaacaataatatcatccattacagatgttgagatggctcactgaagatagggacagaactagaactgggcacaattgcagtcgtctctgcttctctttgttttagccacattctttccagctatgaacaggaagtcaacagcagtcctagatttatacttccccaattagcaaaataaataaataaataaaattaaactaaaatgaaatgacttctctttgctttacaataacatgactgactggccattcccatgtgtctaaaagtagggtcgctaaaagtagagcaatgagatttcatctggtccatagtcatctggtccatagtctggatgagaaatatttccctaaaggagaatatctccctaaaggagggcaagcagcataacctgctgcttatgaagaaggttcttgcttctccttctacttccgccatgactgtaagtttcctgaggcctccccagcatgcagaactttctggaggctgaaaagttcaatatcaatcaagatcttgcagattcagttccttgctgaaggccttcttcctggcttgcagatgagtgccttctcactgtgtcctcacgttgtggtgagagagaactctgcttcctctttttcttataagaacaccaatcctattcgattagggcctcgtccttatgaccttatttaatcttacctccttagttcatttgtcttactgtaatacaataccataggtaattaaaaaaaaaaaggtactgggaagtccagaggctgtgtaaaggggtgacttcaccaaaacgcagtaggacaaggtataaacagacaatataaaaaggtgagttttttcatctttctttaagtttgtgctttcctatttccatagttatacaaaaagttttgtcataatcaaagggtaaaacttgcagaactcaaaaatcaattatggggaaaaatggtttcccacgtgttacttgtaaacctacgaatagggatccagaacagtaacagcttgttactgcattaaagtagtaatattgttaacttggcaaagaagagaactttaagttgctttattcttgcttccaattactattgattttttttcaaaaactcttctgatgtattgagattttttaatgtagacggttgaaaaaagatcagtgaaccaacaattatatattgtagccatttgtaggtatgtcagagatagaaagaagctcaaattataataattgacttcctacagcacatttggtaatgtctggagatattttgggtttttagaatcagaagggagaatgcgattggtatctagtgggtagtcttatagatacacatcctacattatacaggatggcccctcataacaaagaatgatctgtcccaaaaatgtcaatagtagtatccaggttgagaaatcctgcattagggagttctgttgagatcaggaagctctggactagggtaaaatgaaaattaaaaaggatatagataccagaaatgaacccacgtgggtgtgtgcctgattgggtagagcccataaaaggcttgtcctgaaatttttccatcatcatctttttttgcatttaaatttcagtccataattggccatgctttctttaattgaatgaatcctaagaacactattagaattagaaggaatcttagaggtaatctagatcttgggcaaggaaaagtcaaaatgtcttcaatggccagactagtgaccaaatatgtgatatggtgaagttaaagagagactctgtcaactgagagggcctaaaataaacaatattctggcagcagtaaacatgcctgtactcagatcttgatttccagtcctattttccaataaaaggaacaaggcctcttggagaaatgcctgattctaggactggggcagaacatatgaaataaatatcagtctggagcatcttaaggtgctggaagtaaaaaagtccttaacaaacaaaccaatctatattgatagggtatgtcaaaggagaacaagagccaacagaaagagctgcaaatagcactacaataatttgagcactaaaataaagaagtattggattataacccatggataaaataaatatccatgagtctatactgatataaataagtgattttataaattaataaataggggagaagagacaactctcccatgcagaagattttcaaatataactccccacatcttatgtgtgagctgcacagagttatttctttctaatgtgtatggtgtggaaagatgagggagaaagtaactttacagtggaaaatcctgactacattagccagaagatcaaggtcagcatcaaaagtcataaatcgtgtggatagcatgtacccttgatatgatgtgatgaaactgttacttcctctgcatacccctcaactctagtctacttatgggaaaaacatcagataaattccaatacatgagcatcctacaaaatactttgccaatactactcaaaactgtcaaggtcattaaaaaacaaggaaaagtctgggaaactggcacagctctgaggagctgaaggagacctgatgactaaatgtaatggggtatcatggataagatcctggaacagaaaaaggatattaggtaacaaatggggaaatccaaataaactataaactttagttaataataatgtatcaatactaggttattacttgtaaccaatgtacaaagctacttgtattagtctgttttcatgctgctgataaagacttaccagagactgggcaatttacaaaagaaagaggtttaattgaattaaagttccacgtggctaaggaagcctcacaatcatggtggaaggcaaggaggagcaagtcacatcttacatggatggcagcaggcaaagagacaatggggaagatgcaaaagccgaaacccctgataaaaccatcggatcttctgagacttatttactaccatgagaacagtatgggggtaactgcccccataatttaattatctcccacttagttactcctacaacctgtgggatttatgggagtacaattcaagatggggtttggatagggacacagagccaaaccatatcaccactataagatgataatcataggggaaactgtgtgcaggggatatatgggaactctgtcctatttgataattttttctttaaaactattcaaatgtcatctattaattaaaaccaattaaagggaggggtaagacctaagagatcctagaaaatgaatgccctgactgtttaacattttgcaggttgattaaaaacaatggaattgacttgcaatgaaagtcagtccatagatgcccaatttgtaatctctaatctagtcaacctcctttattttgcagatgataggacaagagcctcatcattagtaaagggtttacagaagttgcacgatgatcaattgcaaaaatcagaaacctggaagccaactgaacttcctgggcagcactcttttctctaagtagcctctgctgtgggtgtgctgctttgctagaaaagggtggcagttattagtgaccagttactttttgatcttcatgtttagatatgtgtgactagactgacactgaagcttattatacaaaacaaaaataagaaaacagaattttacacacagcaaagttcttagaagagcaattttaacaattgtcaaatatttttaagaaacaaaggaatagtacttctataacttgtcatgaattttgcagcagctaaaattggtggagcagtaagcttatgtttttttgttttgttttgttttgttttgttttttacaatggtgatgagattaggataagtgagaattctggggatttaaaaaaatctggtgttgtttgaataatacaagataaactatttaagtaggagtcataaaatgcagactaattcctaacttagctgagctatcaccttcatgactttggatatgagcagagcctaagaagtgagaaaaatgatgccaatttaaatattcttatctagaatacccttatgtggttgaatactcatattattaatgcactttagatgaattgatattcttataaatgcacaatgagtatagaatataaacataaaatatattctttagtgttattcatcttttaacatgggaatattctatattaatcatcagtttgaaaatttactcttttagtttgaaaaattggttctagttttacagattttttccaaagttaattatttatttctttttaatggcacagttcatggaaagaaaatgtggtattttttttttttaatcatcaaatcaaacacttggaatttcccagaccggtctaagttcccattttctttctcttgttttaaaatgggtagtagttttaagaacacttgttacagattacctcacttaatccttaatacaatcctcagaggaggaaccattattttcctgctttaaatatgtggacactgaaggtgacagtgagtgaattgctgtctgactccaagtaagatcgtgtatttaccctctatgttctattggcatatacaacagatgtttacaaaaattaaaagctgattacatcgtatctacttcaaaccctgcaacaactccccagtcctattaggagcaggactcagggaagtcttctatgaactccctggtgcccatcaacaggcccaagaggagcctggatggccttgatttatggccttgctgttctttttactttatagaattggtcatgctttcaattatgtatttgattatttgtgtaatatcttttatcacatagtctgtaaattctctcaggacaagaccacataattcactgttgcctccctgctacctagaacactctctgggacacagtagaccatgaagaatagtcactgaatgaatgaatgggaaagggtaatttatttacatatgacaatatagcatttaaatggcatagtttagacccttaccctgcctgtagtccatgcaagatactgacatagtaagttaccttgttactttagtaataaatgtccttggatagagctctggatagattgttctaaactgaagtctattcttcagtcaatgacatgatagtggagtgtatgtatatcaaagtttattgactattaaattatggcaatttgaaatgtgtatttactttcttagaaattctgtttgccttattttgtaaaaaatagagtggagttgatggtaataagaggaataaaaactgatcatgtctgctagttgtgtgcaggggatggggagaggaaattcagaaagaattaatctccttccttggtaaagtacatgtagtgggttgaatagttgtacagtatagtctccaaaattcatgtctacctataacctcagaatgtgaacttatttaggaatagcatctttgttgatgtaacaattaagatgaggtcatatcagattggccataattccaatgactggtgtccttataaggagaggtcagaacacagagacacacacagggaagacggccatgtgatgatggaggcagagattgaagtgatgcagccatctagccaaggaacaacaaggactgccagtggccactgaaggctaggagagaggaagagaatagattcttcagaagggatcagcccttctgacaccttgactttggaagtctaacctctagaagtgtgagagaataaatttctgttttataccatccagtttatgatagcttaaacatcagaaatttgttatggcagccctaattccaaggattctctactaggaagctaatgtattatgtttgatctcacataatttagaaacatcattagctatagcctgagtagaaggcccccacatcccagccacaggacctgatgcccactcctctcttgcttcaccacactgcacgctctcattgcatccccacctgaaacgagagttctcctttcccatctgcagaaccagccgacggtgggcagtgatagccatggaccttctgcacaagtccaaggctgcagaatctgcacgatatgaacaagggacccaggcgattggatttcactatttatcagagaatggtgaaatttttcagggaaagggacaggatgtaaagaggtttaagagagaggactgcaaggagtgagtgggaggacagtcaggggacagagcgctcttcaaaggtatcctattagggcctacacttgaagacttactaatgttttggcacatgggtatgatatcatatacccaccctccccttaacagttttggaacgaatccttgaaattaaaacctcttatgtggttggcacacggttggggaaaggcagatgaggggtattctgtacaggcagggggttaaccactcctggcagctatccagtgggaaatagcaattcttcaggtttaaacaatggtagatttgcatttctctgatggccagtgatggtgagcattttttcatgtgttttttggctgcataaatgtcttcttttgagaagtgtttgttcatatcctttgcccactttttgatggggttgtttgtttttttcttgtaaatttgtttgagtttattgtagattctggatattagccctttgtcagatgagcaggttgcgaaaattttctcccattttgtaggttgcctgttcactctgatggtagtttcttttgctgtgcagaagctctttagtttaattagatcccatttgtcaattttggcttttgttgccattgcttttggtgttttagacatgaagtccttgcccatgcctgtgtcctgaatggtaaagcctaggttttcttctatggtttttatggttttaggtctaacatttaagtctttaatccatcttgaattgatttttgtataaggtgtaaggaagggatccagtttcagctttctacatatggctagccagttttcccagcaccatttattaaatagggaatcctttccccattgcttgtttttctcaggtttgtcaaagatcagatagttgtagatatgcggcattatttctgagggctctgttctgttccattgatctatatctctgttttggtaccagtaccatgctgttttggttactgtagacttgtagtatagtttgaagtcaggtagtgtgatgcctccagctttgtggcacatatacactatggaatactatgcagccataaaaaatgatgagttcacgtcctttgtagggacatggatgaaattggaaatcatcattctcagtaaactatcgcaagaacaaaaaaccaaacactgcatattctcactcgtaggtgggaattgaacaaagagaacacatggacccaggaaggggaacatcacactctggggcctgttgtggggtagggggaggggggaggggggagggatagcattgggagatatacctaatgctagatgatgagttagtgggtgcagcgcaccagcatggcacatgtatacatatgtaactaacctgcacattgtgcacatgtaccctaaaacttaaagtacaataataaaaataaataaataaattaattaattaaaaaaaataaacaatggtagaaagtggatctaccatgattgataataacccatatgaagaaaaggtgtggtcaaggccacagattttctctccagagtacatgtctcaggtgatgctctgaggcacggaaaagggagtatcttcccccatgggttttacttttggcaaacacaagataaaacaaccttccaaagcatgtgaatgttacctagagtcaaataaatcattcttactttagaaagacatagtttagccaataaaagaaatgcaaatcaaaaccacagtgagataccatctaacaccagtcagaatggctattattaaaaagtcaaaaaataacagatgctagtgaggttgtggagaaaaaggaaagcttatataccgttgatgggagtgtaaattagttcagccgttgtggaagacagtgtggtgattcctcgaagacttcaagacagaaataccatttgaccaagcgatcccatcattgggtatacacccagaggaatttaaatcattctattataaagacgcatgcacacatatgtttgctgcagcgctattcacaatagcaaagtcacggaatcaacttaaatgcccatcaatgattgtctggataaagaaaatgtggtacatcagcaccatggaatactatgcagctatataaaagaatgagatcatgtcctttgcaggaacatggatggagctggaggtcattatccttagcaaattaacacaggaacagaaaaccaaataccacatgttctcacttgtaagtgggagctaaatgatgagaacacatggacacatagagggaaaaaacacacactggagccttttggagtgtggagggtgggaggagtgagaggatcaggaaaaataactaatgggtactaggcttaatacctgggggatgaaacaataggtacaataaaaactccatggcacacatttacctatgtaacaaatccgctcatgtactcctgaacttaaaataaaagttaaagtaaaaaataaaataaaaaaatttaaccctaagttaattccatgtttgtatccactctactaactaatgactgttcctagtaattacttgtagcaccttcatgacttggaaattggataaagtaatttttgtcaaaatctatattacctggcacctgtcacttgtggccaggttggagggaatagagttttgcaaagaaaagaaaaggttcccctccaataagttaagtgaatgttttcaaccacttattgttttcactgtcccatggctgatggaaaagactgaagaaatatgtgccttacccaaagggaaagtcatggctgtcttttacagtgtcagaacttgataggatttttaatgttttctctattactggttgaagcagagcatgagtgggtgatggaataacttataaaatacaggaataaatccatctagcccaagaaaatcactgaagagcaagatataatcggcgtgaatatttcctcctctaataactgagtaaggagtttattgattgagagaaggcagagtaaaacaaatattttcaagaatattttcaaaagatttcatgtgatgatgattttgagtattgtatatctgctttgtctggatagctgacatctcccatttttcaaaagctgtgtatgggttggtttgtgctaatcaattctcttttcacacccgtccatttgtcatgtacaggtttatccatcttcggattttccaaggattctctttactcactctggctccataatgcactgtccttaataaacaaataatctgctactgacccaccatgagtagcttttccagtggcggtaaagaaagatgcttaaattaaaatccataatttccaagacagttatttagggttaaagctgtagctttgcaccaagcaaaggggcattttttatgcaaaagtcagatactgagcaacgtgtggtgagttctagtcaattgttctttgatttattcatccactcatttaccaatttatcggttatgttctaggtcagtggttctcaaacttggctgaaattataattacttgtttgtcttaaaagaggatgaaacagtgaggtttgagtacctagttccagggatcctgatttaattgttctgacttgagtctgggcatctgtcactttagaagctctcttgtgttttcagtatatagccaggttcaaacattattgttctgtgtgctggatacagtggtgaaacatacggatggtggtcttgctcacaagaaatttatgttctggtgtgaaaatgaagggccatagacagatgagtaaggtgaattcatataacgctaggttcagtggagaaaatagaaataggtgagaaggatacagaggaccaaaagggagctactttttaaaaagagtggttcataggggagatgaggaatgagcagaagctttaatgtgtttattgtgctcaagagaggaggagcagagaagaaacattatttctttagaaataaatcaaaacatatacacttcatccattttagtgataagagcttcattattcttacaaaactaagtcttgggactttctatgttaataagtcaattgggggtacaaagatgaataaggaacacgaaactttcaatctagtacatatgtaattaacaagttggatataatttggaacatgctaacgtggtggtagtgacgtgaaggagcttttgatccatcggtgggttttagggttgttttaccatattcaaggactcctcactcagcctgttttctatttagcattcctttcaccttaattttggctcttgccttttatattttagaagggtggttttaaatggaatttagaactgacgagtgttaggcaattgtactgatctttgggtagaattgatcaaatgagtaatttaggacaagaacattcacttctcttttactgtgaactttgctaggcactgtggtgattcaaaatgagttagatgtagttagttagttccctgggtagatttaaggaagagtaaataaaacagaaaagaacgtaatcacaatgcaaaattaaaagtgcaattataaggaacacaaagagtgagtgggcgagcggaggagggagtgaagaacttcaactgatagtaaacctggtattgacatccaggctacctcaaggggccggtgctggctctattcatacttattccccaaaatggtatgaccaggatggtgtggttttcgatgaaatctgagtctcaaggagctaaattaggtcattagttaattaaaaaaaaaatcttgggagccagttaaagaaatgcttatctctaaataataaatatattcattctgattttctttctagatggtcttttctttttgttgcacttgactttcacttcagaagcaattctgggtgatttttagttgttcattaacatcccaaggtaacattctgtgtttagcttttacagaaactaggaaaagggcttatagagaagtaaatacagatgaaaacaggagctggataataatagtaatttcacagcacctttcccccaaggtgtttaaaacattttgcaaaatacaaacaaggatactgagaactcccaggggaaggtggcaaaaatcatagcctctatttatagatgagtcttcccagagaatctctgcggaaaagaaaagtgaggtgatatgatgattttatagctaccctaaaaatatccttgacggaagagccttcttatgagaaaccaaattttgtacacagtgactgttggtaatagacacatttattactgattataacaacagcaaaccttccatattaatattgaagttttaatattaatagcaatattaatatttgctattatcagtgtcattcagtacttggttaaatgataaacttccagattgaatcttaattgtgcatacttcaaagtttaaccctcttacttggagttattctgtatttaatatctgattccactgttttttgaattgattttaccctaccaagctgactgtaaggtcaatgtgagaaggggactctcctaatacacagattggtcttaagaatacagtccttttttttttttttttgagacggagtctcactctgttgcccaggctggagtgcagtggtgcaatcctggctccttgcaacctccgcctcctgcgttcaagtgattctcatacctcagcctccgaagtagctgggactacaagcgcccgccaccatgcctggctaatttttttgtatttttagtagagacggggttttaccatcttggccaggctggtctcaaactcctgacccaccttggcctccaaaagtgctgggattacaggtgagggccgctgcgcccagcccaagaacatagtactttttgaataaagcaaactcttttggaacaaaatgttgaaccagtagaaaacaaacaaacaaacaaacaaaaactacattctttttcctcttatgagaccacttacaattacttatcacaccaatggttctggtctatgtcctttttaagtttaccttttagacttttagagattattttccagctagttaaatcactctctaaaaagaattcctttgacatacaaacccgaggagttcttatggtggcctggtgatggtttttagtacctgccggttcccttctcacttcctgtgatggccattacaatcttttgtactctagttagtattctgtctcatactaaatcccttcactctcaacaggcagccttaaatttttccatgtagacaatactgagatcccagccttgtactctttaaacttcccttctttcctcctttagataactttctttcgttcttcccacttatgaatttagcatccctgattcagaaatctgagatctgaaatggtcccaatccaaaactgttttagccctgacatgacgccacagtggaaaattttatacctgaattcaggtgatgggttgcagacaaaactttcttccgtgcacaagattattaaaaatagtgtatataattaccttcaggctatgtgtttgtgtcgcagacaaaactttcttctgtgcacaaaattattaaaaatagtgtatataattaccttcaggctatgtgcataaggtgtatatgaaaagtaaaatgaatttcatctttatacttgggtcccaatccaaagatatctcattatgtacagtcacatgtcacttaatgacagttatacattctgagaagtgattttttttttgagtttaccttttaggcttttatagattattttctagccagttaaatcactctctaaaaagaattcctttgacatacaaacccaaggagatcttatggtggcctggtgatggtttttagtaattgccagctcctttctcacttcctgtgatggccattacaatctttggtactctagttagtattcttatactaaatcccttcactctcaatgggcagccttaaattttccatgtagacaatactgagaccccagccttgtactctttaaactttccttctttttttttgagacagcgtctcactctgtcgcccaggctggagtgcaattgttgggcgattttgtagctgtgcaaacatcacagagtgtacttacatgaacctagatatcttagcctactacacacctaggctacctggtatagcctattgctcctaggccacaaacctgtatagcttgttactgtattgaataccgtggactattatagcccaatgttaagcatttttgtgtctaaacatgacaaaaatagaaaaggtacagtaaaaatataatatagtgttctgggaccactgttgtataaacgcattctgttcctaaacaaaatgttatatgacacgtgactgtatatgcaaatatttgaaaatctgagaaaaatctgaaatccaaaagacttctgatcccaagcatttcagataagggatacacaaccaatatgagattttttttttctttttattgtgtcttgaattaatcttggattaaccaatcacctgcccctgaagctaactccattatcatttaccctcttcttagcaatgataacatctttcctctggactcccttctaagatcacagctttctacattttaactcacctgctcaagtacttctaactcagcccactgtgacctcccacggattgatgacacttccctgagtaatcatcagtacctctggtctgtctccaattccattgttttcctgatccatctcgttaatcattcccttgcaaacagtcctcaacctccacgcctctttacctgtactttggcttcctcatctgtaaaatggggataatagaagtgcctatttcatggggtaggagggtgagggtttaatgaatttatagaaaatgcttgaaacaatgtctggtacatagttagccttgcataggtgattataataatgaggctgattattgctactacttaggagcttcaattgcctctcaattgcctatagtgataagacttgaactcctcatcttggcattcatgctttttctttcctaccctcatcttctttactcccactccatataccccatgccactgcattttgagtctctcctttcttaaaagaccgtttcatatctctgtgcctttgcgtcttctgtttcttcttcttagaatgacttctagtactcctttgtctagctcatttcagttgatccattaagacctgcattagttatctattgctgcataacaagttagccccaaaattagtgatgtaaaacaacggtaaatatttatctcatgcaatggtccaggaattcaaaattggcttggcttggtggttctggctgagggtgtcttgtgcagttgtagttaatttgaaggtttggtgctagctttggggttctgctttgagaaggtgaagttctgctttgaggattgctctctcacatggctggcaagctggttggctgttgtcaggaggtctcagtttctcaatgagtagactgcttcttagggctgttgagtattcttacaacatggaggctggcttttcttagagcaaggggagtgcaagtagaagtagaaatctcttttatggcctactcttggattccacacactgtcatttcctcagtattctactagtcatccaggcaagccctgactcactgtgggatgggactctacagaggcttgaaagccaggaagccagactgctggggtccaacaacttttctgagatcttctctcattacccgaggcagatttgtttacatttatctttttggtgcctccgtgaaagcacttgtagtgttctggagtttatttgtgtgcttgctgtttacatctgccttcttcacaaaattaagaataatgggaaggcagaggctatgcagtttcatgtctgtttcccctggccctatttgtagccccaaagtggagatccaacaggtgcagatttcattgaatcaaatcattacatatttctgttcaggattgaaaatctatcttctaggctgggtgcagtgtctcctacctgtaatctcagcattttgggaggctgaggtgggcaaatcacctgaggtcaggagttcgagaccagcctggtcaacatggcaaaaacctatctctactaaaaatacaaagattagctgggcatggcacctgtaatcccagctactcaggaggctgaggcaggagaatcacctgagcctgggaagcagaggttgcagtgagccaagattgtgccattgtactccagcctgggtgacagagtgagactccatctcaaaaaaaaaaaaaatctgtctactaggataatagtttcctaaaatgaaaaacgctgtgtagtcactgttgctttttttcatcttgagactaaattatattatgtactcacaattcctcttcattttttttagaaagaaaagcttccattatgttcaggttattacttgagtgaaaacctataattttcctttcctgtgaaaaagagccaatcttctagtacatgatattgtctaccttcattttgtacagctcaagtgagattggttgggtgaggtctctcccacaaaacaactattttgtccagttcactgcaaaagctcaatcttccttttctacttgagactttgtgaaattacagtttcatttatttttaaaaaagataaaaagtaaagagtgatggaagttctgtggtcaggtattttctagacatgttttatcaaagagtagaacaagcaaataatgtgtttctcttgagccttcaaatgctaaaactaatcacctgaataagaataggtctgagatttaattctagtgatcaggattggaagtatactctcaagcttttacctttcactctagtgagctgaagtgaattcattttcaaacctgaacacctgtttacataacacagccttaacttaaagacgcaatttacttttgcaaaagaagaagcaggactacaattcatccattcagttactcaacaaatatttatcaaatacctaatatgcactcagatgggtttgttagttttcccaaatttgaatattacataggtccactttaacttacatttcacattggcaaagagaaaaacaaaatgcaccttgcagaattttcactgtgtgcttctttctgtcttgattttctttctctcactgtattctagacttatttttcaggattagtttcaaagctctccctattaagacataccttgcagtccaacattatgtaggggagatatgatgagtagattcattcaagagtaccctcttccatgcctttctgtactatagaagcctctaagagaagtacctgtgtcatcagcttcccttgtagatagaagtggccatgtggcagagtgtagattaatgaattatagggaaaattactgcaaaaagcagcgatttgccttctttttcctctctttcttcctgcttgcaatgacaaataatgctaggtaggacaaagagcctctttgtgactccgaggacaatagtcccacactaaagatggcagagctgggaaatagaaggaccctggttctttgataatattattaaaaaaatacagcagcccagaccatctccttcttgatttttctacattacaaaaataaattctttaagcaactatatattgagttttctgttacttgtagctgaatgaatacatttaactgatatactctttaattacattcactccagactttgttgaatttaaagtgcactctctttaagtttagggtgttggaaaaagcccagtgggttggatatcctcccatactccttcctgtccctcccccctttcttccttacctccttccgctttaaattctactgttagactacaactagaacttaatgtaataaattcctctgaatttttctcttgaatatgttatgtatttaaaaagatgtctataattatgtatgatattttcctaaagccttatataatcctctaaaagagtatgcttgccatctgtatggcttcatggttgattttctgtcatgtgggaaagatgaatctccaagacttagttaaaggtttcacagaataaatatgaataaatatacaaacatattttcaaaatactttgtgttcacacatactttgtgtgtatagcattgcctattgttttctctggagataataagttgatatttgttgactatttgtccaaatagtagtgaatcttggtggtgtacaataaacatttcaaggaccaaggctccagtttctagttttattctattatgaacttgagaagttgtttaagcttgtgatttttttgagacaaagtttcaccctatcgccctggctggagtgcaatggtgtgatctcagctcactgcaacctctgcctcccgggttcaagcgattctcctgcctcagcctcccgagtagctgggattacaggcatacaccaccacacctggctaattttttgtatctttaatagagacagggtttcaccatgttggccaggctggtctcaaactcctgacctcatgatccgctggcctcggcctcccaaagtgctggaattacaggcgtgagccatcgtgcccagcctaatcttatgatttctaaatagaaataaaaatatttgacttagtctccctagtaggttgttgtgaaactcaaaaaaggaaatagattggaataatgtactatataaatgcaaaatatactattattaattgttactaaaaattccagagtatgaatgccaacattgcttcaaattagggttatttatttgctatgcataagcatagattttaatgttttcctatactttccatttggagggttaagtcagtgaggacattaaagattgaagggaaaacatacatgtttcccccactctacttccagctccatttcggaggtgaatttcttgctgaaattagtgtgcggggcagacaaagcatggtgaaaacattagcctattcctttccaggctatgattagtctactaagaaaatctacctcttgtgaagtctccagctttcaggaattaccacgagagaaaaatgttctgggggagagacggtctctcacaaaatgaatgcattgaacatattcacctgtattaggaaatagagaagcaaggataccagttcaaaggcaatgaaaccagccataatcatataagaagccaaaacatcaaaagagaaaactttcttgctaatttttcactgcttcaatgatacattctagcaaggtatgtggggaagaaaaaacaagtctggagttggcactccccgcagctgaagtttctctaagtagactgtgatggttaattttatgtgtcaacttgactgggttaagggataccctgatagctggtgaaacattatttctgattgtgcctatgagggtgcttctgaaagatataagcatttaaattagtagactgaataaagaagagctggcctcaccaatgtgggcagacatcatccaatctattgaggtcccagccaaacagaggccttcgactgcgagttacatcaactcccctggcacttaggccttcgaactggcctttcttggttctccagcttatggacagcagatcatgggacctctcagcctccctaactatgtgagtcagttctcatcataaatcccttataaatctatatatcttattgattttgtttttctggagaatgctggctaatacataggctataaaaaagaagtatattcaagatagaggtcttacatgttgaccccaaaatcatatagatacaagtgcttcctggaggacagggaaagccagcatgtgacctgacttacaacactgttaagtctggagaagaatagaatttcctcttttacaatgtgtattccaaagcctcatgacctctgcctgaaaaatctgcttttatgtagggtctctctggcctatgaataaattattattcatatcatttattcagataattttacactgggttgccagtggataaagtaagttttttgttattagtcatgcttatttttgtgttaagtgtatgtatatggacttagaatgtggtatactaagaaatctagcagggctttacaggagaatatatttaactggatcatcctttcagatagttcctatagtttatcttatttaaaaataaaatattatatatttttcataggttacattttaaaaacatgtctattaaaagattaaatcactatatgtcaattgaataagtgatttttaatgaaattaagctccattcatttcaaactctaatatatttacatttaaattgcatttcagaaacaatgaaaaaaactgtctgaacaatatattatgaaaggacataattttaaaatatcaatatattttacttaatttctttttttttttttttttttttttaagacagagtctcgctctgtcgcccaggctggagtacagtggcccggtctctgctcactgcaagctctgcctcccgggttcacaccattctcctgtctcagcctctcgagtagctgggactacaggtgcccgccaccacacctggctaattttttttatttttagtagagatggggtttcaccgtgttagccaggatggtctcgatctcctgacctcgtgatccacccgcctcggcctcccaaagtgctgggattagaggcgtgagccactgcgtctggcctattttacttaatttcttcttccaaattccattcttacagctgatctcttccctggtttgggccactgtaaagatttgctttttcatgtagacctcatacaagagtgtattagtctgttttcatgctgcttcataatttatccatgcttcataaattatccatgactggataataatttatcatgcttcataaattatccatgactggataatttataaagaaaaagaggtttaatggacccacagttccatgtgactgagaaagcctcacaatcatggtgaaaggcacctcttccacggcaggcaagagagaatgagagccaagtgaaatgggaaaccccttataaaaccatcagatcttgtgagacttattcatgagaactgtatgggggacaccacacccatgattcagttatctctcactggctgtctcccacaacatgtgggaattattggagctacagttcaagatgatatttgggtggggacacagccaaaccatatcacagagtatgcatgttcttgctcaaaggaaagaacctaaacattctttactcataatatgatatttggagcagcttcatagtagatttttgtactttagcatcgggatgtctcagtgtttgttaacaactaataaatgctccgtataggttaacaggaatgcttagactataaaaattgaagagaaccaacctcacttcaattattattgttttttacatgtaaaggattgtgtctttagtaaatatcttttctataagtcactataaagtttacatattttcttatgagtcctcagttctctcagacagtggctggtgaataaacaatactccacaggaaagaataagttatgattttggggggctgaatcaaactcttcccagataacctacacaaaataaaattataatgactgaatacatctaaacaatttatcataattgataactggtttttaagaaattgactagattcagttggcttttaacatagaatgttatttgactaacagaatcaattatttttcttcccaaagtgacttgggatatttgggtataatttttgtgactgccataaaagctagacttggaattaggggactctatattaaactagaagagaaagttttgaccccaagaatagtgataatatttgaatcatgcatgcttctttttaatttttaattatttatgcattaattgagtatgcaattcaccgcatatgccagtatttttttttaattatactttaagttctggggtacatgtgcagaacgtgcagttttgttacataggtatacacgtgccatggtggtttgctgcacccatcaacccgttatctacgttaggtatttctcctaatgctatccctcccctagctccccagcccccacaggccctggtgtgtgatgttccccttcctgtgtccatgtgttctcattgttcaactcccacttataagtgagaacatgtggggtttggttttctgatcttgtgacagtttgctgagaatgatggtttccagcttcatccatgtctctgcaaaggatgtgaactcatcctttttcatggctgcatagtattccatggtgtatatgtgccacattttcttaatccagactatcattgatgaacattcgggttggttccaagtctttgctattgtgaatagtgctgcaataaacatatgtgtgcatgtgtctttattgtagaataatatataatcctttgggtatatacccagtaatggaattgctggggcaaatggtatttctagttctagatccttgaagaattgccacactgtcttccacaatggttgaactaatttatattcccaccaacagtgtaaaagtgttcccatttttccacagcctctccagcatctgttgtttcctgactttttaatgatcaccaatctaactggcgtgagatggtatctcattatggttttgatttgcatttctctaacgaccagtggtgatgagcattttttcatgtgtctgttggctgcataaatgtcttcttttgagaagcgtctgttcgtatcctttgcccattttttgatggggtttttgcttttttcttgtaaatttgtttaagttctttgtagattctggatatattagccctttgtcagatggatagattgcaaaaattttctcccattctgtaggttttctcttcactctgatgatagtttcttttgctgtgcggaagctctttggtttaattagatcccatttgtcaattttggcttttgttgccattgcttttggggttttagtcatgaagtctttgcccatgcctgtgtcctgaatgatattgcccaggttttcttctaggatttttatggtcctaggtcttaggtttaagtctttgatccatcttgagttgatttttgtataaggtgtaaggaaggggtccagtttcagttttctgcctatggctagccagttttcccaacaccatttattaaatagggaatcttttccccattgcctgtgtgtgtcaggcttgtcaaagatcagatggtggtagatcacacatgcttcttttgtcaacttcagatctcttgttatattcttggtgatgatgatgtcagttttactaattacgtcaaatctgaggttccaaagcagctttaagagagactgatatctatgtgtgactgcttctctacttctgcaatggaacatttcaagttgttgttttaagaaattcctaaaatagaattttaccctactgatttatttacctcattgaaggtagaactcaatggctagtttttttttcccggcataaacatgcacacacagttagataactttatgacactttttttttcactcaacaaaaagttactgaacttatgctaggcccttggcccttggcaagattctgggaatataaatacaaataagacctggtgcttgcccttaaagaactcattgtttagcagaggaaacagacacttaaatggttgaccataatatgcaataataagtgttgtaaagtatgaacaaagtgctagtcattaagagtaacagccgtaaagccatatgtagttttagctatatatagatatagctctgagacatgaatacacattaaattctttcaaaaaaaaatcccaggaggctgaacaatgttatacaatgatgcttaacattttttttggaacacatgccctccacaaggcacatattaattgtctacactcaacagaattcaaaataaaatagttataaaaatagaacaatgagaaaaagaacagagaagtctctgtaattttgcaataggtggaggtaagatgagggtaactaaagagacagtgttttaggtagccatatgggtagaaacctagacaaaggcaagtgaaagatagagactattgatcttggcagggaaggtacagtcatcgtgatgtctgatggtcttgccaaaagctacaatttcatggctcagtaggattagttgggcaggagagtttgaagatacatatataaagctttagaagagagggagttatatatttttgaagatagtagataagtaacattaggacatctgagcagattgtaacattttctgtggactattgaatttttcactgtctacatttagtggatttttagaggacggggcaaaatatgttatcacgtctaatccataaataagatatggacaatcctttgcagaatatcaaccgttgcttcacattgtcgttgaagacaactgcatgaatactagtctttgttgctagctgtgatgaataatagctaagaaaaatacagaacccccaaaacacagtctctgtgtttcttgacatccatgatgagcagcatgagaaaaggtggcatgaatggctgctataagggcttcctagttctcatgctatgtcccacaaactatgattttaaattaaagattaatttctttggtttttgcataccaggaaagtcacattttcctcagtatacaaatagccctgtcctaatcctgtaagtttgggaaagaaaagttaaagggggaggtgggaatgtgataagacaattcatccattcattcatttattcaacaaacattcattttggaaggttcaatggcatgtaggtctcaatggagtcaaacatttctggatgtaaataactagagaagggggttggtaatgatgggagatggtgattggaagaaaagtgattgttgaagtgagattgtgagtggagtgttgttattggcaatcacaagacctagggcagtgccttctagtatttttttttctattgtggtgcatatagaaagtgaaaatatttatatagcatatctggctgggggctttaggtgctcccatcctgctcagcatctgtgaggggccaaagagctcaacacctcatggacatgagttggagagtttgcttggtgctatgaccatgggagtggatggctgggccagaatgatgaaccaggaactgagaggccaaggtgttggaaagcttacacacatagaaatcaatcaccaaggattaatgacagaggtcatgtaggagacagcaacaggactcaatcaaaaaataagatcttcaaagagggctgcagacaacagcaacaaggaaggattgctgtctgattgtattagtctgctggggctgccttaacaaataccacaggctaggtggcttaaacaacagacatttattttctcacagttctggagtctagaagtccaagatctaggtgttggcagggttggttccttctgggacctttctccttgacttgtagatggctgtcttctccccttttcttcccaggatctttcctctgtgtatgtttgtgtcctaatctcctcttcttataaggacatgagtaatattggagtaaggcccactctaatcatctcatttaaccttaaccacctctttaaatatcccatatccaaatcacattctatggtactgggagttaggacttcagcatatgaatttgagggtgggggacatgattcagtttataacagcaatgatatgagccttaaggttggggagggtatagggaagagggagggagaattctctgaaaggggcaataaagagcaacaaggccacctactccacctccagacctaggagggaaaatagccatcgctaaagagggaagcaaagaaaaccatatcctcgggggaacaaaaaggtgaagggaagattaggagaagagggtgacattctaggggattttatgcctgggaatatggtgacacatctcacacttttctgactcatccatgttgcatgtagacacaaaatacacctaggaaatggaatgtcttatatgtgcttgtgaaaagtcttcttctgctcctccacccaggctcattcagggagtctcttccttcccagggcccctgagagttacactttgcaccatctcaatggtgcagttctctataaatatgctgatatctgcactttctgaagctttcaaggtgtaaaaatagtgttgtttcctccttttgtgcacaatgagcctgaatcacactgggcttcttaaagaaatgggggtagacccctcctctgcttggaaatgtgctttgtcccctggaccttagtctcaggggccccttgtgaaaacagtgccttcctccatctttggcctgttgcagctccattcatttcttgcaggagtggtctctgcacccaggctggataacagacacggtatagtcctcctcagtggttctctttttctccaggtcattatctctgtctcttaggtgaacatgaagcctttagggcaaattaaatcataaagactgagatatcttgggcctacaaccagttcatcaagcatatatagtgcttgatccctaacagcagatccagcttgctcctctgcttggtctctgttcccctgctaccctctttccaccactcaggtctcagtcaaacactaccccttctccaaaagacctttcctgaccactttgctgaaagaagtaccccacttcccctccacagtcattctctatcacaggaacccactttattatctccctgtgacagtcgttctctggaattattttgcatttttcttgctcacgttccatgaccctcgccccattaggatagctcttgtgtctggttcatcagtgcctagaacagtgcttatcacatgttatttgttcaacaaatatttatcagatgaataaattgatggttcattcatcggaaagcagtgagcagcactggcatggcctttggttttatcatccaattttttagtgaaaaaatggtttttaatctgatctattttgagcccattttagtttcattgaaagccaatttgcatttgaacacttgatcttgctagagtgaagcatactctaagattgacctgatttactcataatacacaaaaatcagtaagtcctgagactttgtattatttctgtttcatccgtggcattcattctgctttctaactaacttatcataagtatcttttggttgtctgccagtcagtaggccaggggatctggaaatattcttcgggttgccattcttgatgttccagcacccagaggcaaatggacactgatgtgcttgacaagagcctccttttgtaaccctatcagtaattgcccttcctatgtgacccaacgggggtttaggtaggatgtgggctgcagcgctaactctgatatctccttggtgggttggggagcctaccattgccacttcattctaattcatgcccctggtttttccatacaagcctaactcagagatactgcaaattcatttccagcccaccacaataaagcgggtgttgcaatgaagcaagtcgtggaaattttttggtctcccaatgcaaataaaagttgtgtttacactatgctattgtctattaagtgtgcaatagcattatgtctaaaaaatatgcatactcagctgggcatggtggctcatgcctgtaatcccagcactttgggaggccaaggtgggtggatcacctaaggtcaggagtttgagactagcctcgccaacatggcgaaaccccatctctactaaaaatgcaaaaaaaaattagctgagcatggtggtgtgcacctgtaatttaccccaggtacttggaaggctgaagcaggagaatcacttgaacctgggagtaaaggttgcagtaagccaagattgtactactgcactccagcctgggtgacagagtgagactctgtctcaaaaaaaaaaaaaaaaaaaaagcatacctcaattaaaaaatactttattggtaaacagtgctaacaattatctgggccttcagtgagttggaatttttttttgctcaaagagggtcgaatcttgctgctgagagctttcaactggattaggctttgatttatgggactgttgtggtggtttgagcttctatccataccactcagactttctacatatcaataatatgctacttcacttttttttaatcattcatgtgttcaccagagtagcacttttaatttccttcaagagcttttcctttgcattcacaacttggctgtttgatgcaagaggccaagcttttagcctatctctgttttccacatgactttctcactaagcttaatcatgtctaacttttgattttaagtgagagacatgtgactctttctttcacttgaacatatagaggccattgtagggttattaactggcctaatttcagtattgctatgtgtcagagaagagggaggcctgaggagaggatgagagattgaggaatgactggttggtgaaggagtcagaacacacacaacatttaccagttaagttcactgttttactgggtgtcatttgtggtgccccccaaacaattacaataataactcaaagatcactgagcatagatcaccataaaggagagaataataatgaaagagtttgaaatattgtgagaattccaaaatgtgacacagagacacacagtgagaaaaatggtgctgatagacttgctcaatgcagggttgccacaaaccttcaatttgtaaaaaatgcagaggctatgacatgcaataaagcaaaatgcaacaaaacaaggtatacctgtatttgcttttggccttctttgccttgcctccaattgaaaatttggataatgaccttgtctttcatgactagttgacagcaggtattgtggacaactcccagtgactcagtccatcctgattaatttagactttgttaacaatggaactgtgtaggactggacttgagtttattctccatactttggatttgatgttttttttcatcctcagggagccagttatccttctgtgagtatctctcaacttcacttactttggtgcgatctaggcccttcatccaggcttcatctcttcaaaagagttcccagcatgttttcctgcttatgagttattccagtcacaaattcatccagccgtctcctatagaaacaggtgttcataaaaatcaaatgcagagagatgtcaaagatagaatacattaaaagaatataaacttacagcttattttcagaagatttaccttaatgggatgttaagctttgtttaggtatttaaataactggagtaaaattcaatgttatgcagacatttatcataagaatatcaataatcaaattaagtccctgaataataagagctacatgctcttattaagttaaattatggtcactcattcaatctgtttcccctcaccaacatgaaaatgggcttttcctgtttcatagaaaactgaacaatttatttcagtcattgatggagtaggtcagtgtttatcttcatgagttgatattaaatattctctaactataaaaattattagtgctactgtagcaaagaagcattccaagataaagagagggaaaatcccatagccaaattggagttaaagtagtaggatacagatagtatcatgtgcccaaagtcaagatattcattcattctgtggatgcatcatatgaaaaaagtccaggaaggtagtcctgaaagttagggtcttagccaaggggcaaccatgtttcttttgtttctgacattatatacatataagagcacctttgggtgaatatttcactataataagtgtaataattattaattctcaagactgattacaatgcaagtatcatattgaatcattgtatgaatataaaatatttaaaccaaataaaatatattagtcatacatttaaaaatgttaatcaaatgtatttgcctagattctttcaaattggaaaatttttataattaataaaccactttaagaattgtaaaatactgaagcagatgctcatcactcactgtgggtcctgtctgtggaatgaaatgcagttctttctgctttattcctgttggtggtttgtttagctttcttcaagagggagacataaaaaataagtgaaccactgacatattggagttacgacagttgcctgttttgaccttgacttccactataatattaggtaattagactaagaggagtcttttaaaataacatacatcaagcaacatgtgacttgatattgacaggaaatgttatctcttgtacctatgaataggaagttatttataaggaatagggtaaaaggagtcttcatgtccccaaacatccttctgcagtagccaaccatgggatctgagatgccgctgttgtagatgctttccctgggtgctgatttcacaggtcttggtaacaccatgaaatgaaatagcaccaaggtttaacttggaggcacaggtatttccaaataccgggaactcagaaatctcatcttatactttctgttattccttataacacctaacaacatggtagacttgcagtatatgcaatattgaaaaaaatgtaacaatgaaactctttacagtctttgcaattatcaagacactaagaagttgactatgttataaaagagaaaaccttttgacaaattgtaagaaaaaataaaaggggtgtctgcattaggtaaaattcattcacttatccatttatcaggcattcgttgagcacataaccggtcctcaaatagcaaatatacagttgcactacaaggaggataggtactaccttagcagtaggcttgtgcaaggctgacattcaggtggtactcacaggaaagcctgtactaaatgttaaaattaaagtacctctttactggttgatagtcactgttccacatcctctaaatgactctttgttgccctggcttctctgaacccttcctgatatggtttgactgtgtccccacccaatctcatcttgaattgtagttcccataatccccacgtgtcatgggagggaccaggcggagataattaaatcataggggcagttttccccgtcttattcttgtgatagtaagtgagttctcacaaaatctgacgggtttataagtgacttttcttccttttgcttggcacttctccttgctgctgtcatgtgaagaagaatgtgtttgcttccccttctgccagattgtaagtatcctgaggtctccccagtcctgtgaaactgtgagtcaattaaacctctttcctttataaattacccagtctccagtatgtatttattagcatgagaatggactaatacagtagattggtactgcagagagtggagtgctgctgtaaagatacccaaaaatgtggaagtgagtttgaaactgggtatcaagcaggggttggaaccatttggagggcttggaagaagacaggaaaatgtgggaaagtttggaactttctagagatttagagggctcagaagacaggaagatttgggaaagtttagaacttcctagagacttgttgaatagcttcgaccaaaatgctgatagtgatatgaacaataaagtccaggctgaagttgtctcagatggagatgaggaaatagtttgaaactagagcaaaggcgactcttattatgctttagcaaagggactggtggcattttgcccctgacctagagatctgtggaactttgaacttgagagagataatttaaggtatctggtggaagatatttataagcagtaaagcattcaagaggtgatagaacataaaagtttggaaaatttgcagcctaatgatgcagtagaaaagaaaaacccattttctggggataaattcaagctgactgcagaaatttgcataagttacaagaagccaaatgctaaccaccaaggcaataaggaaaatgtctccagggcatgtcagagacctttggggaagcccctgcatcacaggctggaggcctaggagggaaaaatggtttcctgggctgggcccatgacccccaagttctgtgcagccttgggacatggtgcctggcatcacagctgcttcagttccagccctggctaaaaggtgccaatgtacagctcaggccatggtttcagaggatgcaagccccaaggcttgatgacttacatgtggtattgagcctgtgggtgcacagaagtcaagaactgaggtttgggaacctctgcctagatttcagaggatgtacagaaatgcccagatgtccaggcagaagtctgctacaggggcaaatccctcatggagaatctgccagggcactgcagaagggaaatgtggggtaggaacctccacacagagtccccactgggccacttcctagtggagatatgagaagacgtcattgtcctccagacctcagaatggcagatccacagaccgcttgcaccatgcatgtggaaaagctgcagacactcaaagccagcccatgaaagcagccaggatgggggttgtaccttgcaaagccacaggagtggcactgcccaaggccatgggagcccacctcttgcatctgcatgacttggatgtgagacatggattcaaacaagatcattttgaaactttaagatttattgactgccctattggattttggacttgcaaggggcctgtagcccctttgttttggccattttctccattttgaacaggtatatttacccaatgcctgtacctaggaagtaattaacttgtttttgattttacaggctcttaggaggaagggacttgccttgtctcagatgagacttttgacttggacttttgggttaatgcttcaatgagttaagactttaggggactgttgagaaggcatggttgtgttttgaaatgtgaggacatgagatttatgaggggccaggggtggaatgatatgatttgggtatgtccccacacaaatctcattttgaattgtagtttccataatccccacatgttgtaggagggaccaggtagaaataattaaattatgggggtggcttccttcatcctgttctcatgacagtgagttctcacgagatctgatggtgttataaggagctttacctcctttccttggcacttctccttgctgtcaccatgtgaagaaggatgtgtttgcttccccttctgccatgattgtaagttttctgaggcctccccagctctctggaactgtgagtcaagtaaacctctttcctttgtaaattacgtagtctcaggtatgtctttattagcagcatgagaatggactaatacacttccttaggattccctgtgcttcattttggtccagtaattaagatttgacatctagtacactactccaaccccagcacaattctgattggttggtaccaacctgttcttaattattttaaatattattacccctttgtacctgctggaagagcagtggttctcaagcttctgttactctttaggatcaaaacagctgactgagttcacccaagaactctcaaattataaccctccaggtggggtctgcaggctggttaagaatagttgtgttagaggaacatagctgaagggtatggcctgttacttggaaagggactcaccagttacataatgagacctttgtctggggaaggagcaactctaagccagtgggtctcaatcttggctgcccattggaatgaataataaggaaaaaaaccccaataccaggatgttattccagagattccagtttaattggactggagtgtggcctgggcactgagttgttcttttttttttttttttttttttaaacacttcccatccatttttatgtgcagccaaagtcgagacccactgctttaagcagagaataaagcaagttagaacatctagccttgaaagtatgtataaatggacacaggaaggggaacatcacactctggggactgttgtggggttgggggagggatagcattgggagatatacctaatgctagatgacgagttagtgggtgcagcgcaccagcatggcacatgtatacatatgtaattaacctgcacattgtgcacatgtaccctaaaacttaaagtataataataaaaaataaaataaaataaaatataaactttaaaaaaaaagaaagtatgtataagtggcttggaaatagaagaaaaaggatatattgataacatgtgtgtgtgtgagacagagagcaagagacagggaaagagcatgtaaattaaattaactaaataaagggatatagtataaaaggactcaaagacagattttcttaaggttttcctagatcctagtaattgcattattatcatttggttttctttagtgtgtctcccagtgattgacagattgggcaattctgatcataaggattctggtctctaagtgtccagaatgtatagagcattataaaaacagcttagcttactaattgcagcttccttccctctttgcagcttcttttcctaactctgcactgcaggcccagtatattttgtaacccccccaaatctcatttgcggccagaattgtgacatcaactcttttttttctggtgtggtttggaattaaatcatggtgagaactaatttcagaaccctcgggcgagtcatggctgtttgagcaactcttaactttgcagctttcataagtgctcattgtctaaatgtatgcccatttcttggaactgagcttctattttgaatctaactttgtattgtcaataccctctaggcaaataccaccaggaacacacctataatcaaacaaattgagtttatgatttgttgcagaaggagaacatatactgtaggaaactatggggtgtctaagagagcgggtgttagaaagaccttcttacaggatttgggctttggttgagtgatgtcagagagggtccacaaagcaggtgttcactctcgattgaacgctgtcagaaagtgggggcaattctataattgggtatcttaatatatcttatttatagagatggtagattaattataaagtagcagtcacacattttggctaagagacaaaatatctggcattttgtgggtagcatagtgaccttggttttatctttccttggataaaattatgaagtggacttgttttacctcactttatcatggtctcagagtaaactcgtttgacgttggcattctgtgagattgtttaacaggagaataacttgacataactgtgtgtgctacaccagcttctgggggccagggctgcctttcccctactacttctcagtagtgtgcatgtttttgttttttttgacaaggtttcactgtcatccaggctggagtgcagtggtgcgatcacagttcactgcagccttgacttcttgggttcaggtgattctgccacctcagcttcctgagtagctgggattacaggcatgcaccaccatacccagctaatttttttgtagttttcgtagagatggggttttgccatgttgcccagggctagtttcaaacccctgggctcaagtgatctgcccactttggcttcccaaaatgttgggattacatgcctgaaccactgtccccagccctgcatggttatactgcccaaaatcccagtttctttctaaaactagtgttacagctcttttactcccatggttagacaagttctgagttcttgtcccacaactgagaagaatgaggtacacagacatcagaaagtgagtaaggcagaatagaatttattgagcaacagaaacactcttgacagtgagaggggacccaaaggtgtgttgctagccatgaggctaagtctagggatttttatgggcttgaaatggggaagtgcatgctggttggtctatgagtatgtttgaaaaagcaccattcagaaataggcacaatagtgtagatgaccttttggggaagggtatgtctacataaaataggtgaaggaaaaggaccaatttggagagagcatgccaaatggaaatgggagctctcgatctggttcgtggatttacactttggttttcaggctttagattgtccttggcttgaaggttgagtttcactggggacccatccctttttgcctaggaatttacctgccatggtgatggtggttctgtagccactgcagaggatgggataaagttctgaaggcctaaaagctgacctcacactgcagcctgccactttggttctatcttgtcaagcttccttcccaataactgaatgggtcccactgttaccaactcttgcttccgttgaacttgttctgacaaccttactgaacaagccaatgattctgctggcccagcttgttcaactctggtagttgcatgaagctagttatggtgaccagaatttctcttcttttcagcacatcaccaccttctgctagctatgcaatgctctccatcctacaggactcacatccaggtgagtttgtgtgagaagaaacacttattttattttattttttgggacagagtttcactcttgtcacccaggctatagtgcaatggtgcaatttcagctcactgcaacctctgcctcccaggttcaagtgattctcctgcctcagcctcctgagtagctgggattacaggtgtgcaccaccatacctggctagtttttgtattttagtagagacgaggtttgaccatgttggccaggttggtctcgaactcctgacttcagatgatgtgcccaacttggcctcccgaagtgctgggattacaggcatgagccactgtgcctggcctgaaacacttacactgagtcaaatttgtctctttaaacctctcttctaactttgttctgtttctgcatgacagccctttagaatttttattgattacatgtttgctgaatgaatacatcgtctccaaaataccagcatttagtaatatgtagccttttcttttgtttaggaagcttggaatattaaaaacaaatgtgaaatatatgaaaaaggaataaggaggaggcatggagtagatgtgaaagaaagaaggcaattttagaaaatggagttcatggtagacaaactttctttcttttttttttatttgagacggagtctcgctctgtcactcagactggagtgcagtggcaccatctcggctcactgcaacctccgcctcccaggttcatgccattttcctgcctcagcctcccaagtagctgggactacaggcacccgccaccatgcctggctaattttttatattttcagtagagacagggtttcactgtgttagccaggatggtctccatctcctgacctcgtgatccacctgccttggcctcccaaagtgctgggattaaaggtgtgagccactgtgcccggcccatggtagacacactttcaatgaaaaatgagaaacaaagggagtcataggcatttacagttgcctaatctttctaactcaacttcctgcttgaaaaaaaatttcctgtgactctctgacataattacacagtcacccaggaatgctggatggtcacatcatagggaatattaaacagaaaaacaataataaaaagaatgtgtataacaggaagaaagaaggcaatattagaagcatccctgcaaagaacagatgcaaagatttttccattgttgtggaaaggaacttgaaatgcaaagacaaggccaaatgactcgctcaaggtcacctgggacctcagggcagaatgaaagagtagattattgtcatgctgtatccaccagaccatgatgtctcagtagcaatgtacctgcaggctaaagtcacatgtcacatagttagcacactgctccctgccagacttgaagatagcagaatcactgttttaggagaaagatttaaagctgtcattaatgaatccaagtagctgtttttgtaagtacataaatatctctagtatggagaggcagaattaagtcttgatagccacctcacaaatgttgactataaatgtttggttagtgacaagtctagctaaaaaggaaatagaatatttatgaactgtcatgaaaaggaatctctgcaaggctcacatttagacaacagtgcaatgaaggcaatcttatgagttattcaagagaatcgtcttgggaactggctctatggtaattctgagaattacctatataaataaagtcaaattgggaaggtgggccgttctgtttttacatagaaaaaatcatttgagtttctaggacactgtctaagatgtactaaaatggagattatcacttgcttattttcttgaaaaaccattaacatagtacaatacaacagaagagtagtggccaatagattccaaaccagaaggaatgtttatggaagcacacacacacacaaaaagactccacaacttacttacattacttttataatattcctaattattatagtggtttgaaagaggtcaaatgttacatctaaatataaaagattagacttataaatgacaagattgtactgaccccaatattctatagggttgaaaacaaaatacaattgaccttcatgatacacctgatataatgcaggtctttgttgtacatcagattacattctgcctgtcttgaaataataatggcattctttatgaagccatttgattaactagaatcatgagctttgcaggaggaaatgaatagtggcaagaatgacttgctttctgagtaaacatagcctagggaaatgttttcctgggagagcactctccattctccacctcccctggtgtgtcctctgactaagtagttcttcccgtactgcatcgctgcccagaatattctgaagacagcctcccaccccaccccacctcatcatgctcttccaggacagctacaggaagaaaaggagataacagaatctaatgatgtcccataagatctccagtcaaggtgtgaacatgaagctccagtgagtaatgtggtgtctcacatctataaatgccttatgtgtgactgatgcattcttgagacatgtccaggacaagtagaattaagtcttgatggctgcctctgatgatcacaccctcatcagcagtctgatctatgctttgtttgcaaacccggaccttgttgtggcctgcaactccccacaggctctctccccagctgtcaagcctcttctaaaacacacttcccctttagagagggccgtcttcactcatgttagaacctgacactccgagagactttcctctcaccagctggttttgactgtggcagaaatgttgttgacatagcagatggtcttgatatttctgaaaaccggcaacatctttgccatggccacccccacactcttggctactgtttctccttcaagtagtttgggtcatttttagcaaacctgtatgttccaatattttttcttaaatatcagaacagggaacagtgtaagacaaaagtctcctaaaatatagaccaaggcagaatatgagggctgttttgcagaaaacccaaaagctgaaataaattctatttttaatcagattctttgatgaattagaatgagcaaaaagtgagcagattttaaatatttgtggtctgaaatatcaggcagtaaggtatggctaatggattgtgctataagaagtagagtctgatattcatgatgtttgaaagcctcttaaaacaatataccagtgagtaatgtttatccttattgaacacaaggtgacttgagagaagggtaagtgcaactggattagagattattacttagtagtaactctagagccaaagcaaatctaagacaccgtaacaatgtgatgacctgggacccaatccagtcatcctgaaaaattaaaagcagactgatttattatttccttgcttgctccttgcaggcaggcactctgaacactctcttaaactcactagataatggtataaacagctctgcttcatttcggagatatctgtacaattttagaaaatgcttattctcctggaaaggactttcacacagatgggaagtaggcatgagcactgcaggccctgccaggttcagtcagcttcttgagtcaacatcactatccaggcctgtagcactcatgattgagagtgtcatttggattggctaacaaaggacagttgagaactctgcctccaaaatgtcacagttaaaacacagcttactagatacaaatcctgccttctcatggtaatatcaatgatccgtacagcagtgaaatgtggagctaattgattcctttgaatgccaaaagcagggtcctaaggataagaacgcagtggagtcatatggatggatggggtatataaaaaggatgggaggaatttgtggaagtgtaaacgtggcatgtcccatgtaaggcaagctgaatgaggaaaaccaatttgggtgtcaggtgtatggtggggtgggatggcaagaagactcacgcatggcacaagacagcagagagggtaatgggtaatgcagggattgtcatgagaagctaggggtggagaagcactgggtatatgatgtgttataatttctagttccttcctgttttgttgattacattagtagtgtctccaaaggaacacaatgcttgaaataaaagattcttttcataatggaaaatgacttacttataaaaaatattctgtaaaccctaccatcaatctggcttatctccaagcacagaaaagcaagataattaagagaactgagacaatgtgaaaaacagttaacgactagatgaaacggacaccaaaccaatcagaagagacgtagagctagattctttgctagatcattgggaggtcaggaggacccagcagtggtatgggaggggatttgggataattctaagggtaccaaagcatttcagtattttaatacacagtcacaccagctaaatacaagccctgaaggtaaccaacatttcttataagtcatgtcttataatagaaatatttaataaagtttttagagccaaggaaagagccatatctgagacccttctcacttgttaaaggctccttactcattatcaacctacatctgtcaaccaaatgaaacaaagtataaaataagaatcctcctacatcttttctcgttaatggaagacagtagcttcaaggaaaaagtaaagattcagcaaagggtttaaatacaggccacatttaacataggtccagttgatttgatcctttcagatcagcctctgaattcttgttgttcaccagtaaatacatattttgtgttagtccattttcatactactataaagaaatacctgagactgggtaatttataaaggaaagaggtttgattgactcacagttccacatggctggggaggtctcaggaaacttacaatcatggcagaaggaaaacgagaaacagacatcttctgcacagggcagcaaagtggaggtagtacaagcaagggaaataccagacacttataaaaccatcagatctcgtgaaactcactcattatctcaagaacagcatgggggaaactgccctcatgatccaattacctccacctggtcccgcccttggcacatggggattatgggatttacaattcaaggtgagatttaggtggggacacagagccaaaccatattatattcagaacagatgttgagcccagctgtgggagcagtaatggcctgtgagccagattgttacttggaactttaggacccttgacgggtttgagaatagtgccaattcttctaggatgtgtttgggtttcaaagcattttgaaaatatttggtagacatgtgcaaacataccaaatgtgtaattgtccctgaaagcaggcatctaattgactatttagtgacaacataacatgggcctcatttcttaagaaacagtaggtggtcaaaattttaggagaatatactccacagaaactcatgtagcgtagctcagtgatatgcctatgaatcttgaatattaatttttctttcctcatgaaaaatgcatctatccatatacgtataaatattttttcttttttaagcaaaatacttagtcaacttgtaaaagaataaagaattctatataaaagttttaaaaattgctttagaacaacgtcagttggaaaaaaattcataatttttcataaatacattttctttgtatttaaagcaaaatatttaacaaagtatgccacatatgaaaaatgtgtatgaagaggtcgggttagtctcaaagtaatctgatggtaaatcatgcctatcagaggtagattccaatatcagaaaaaactgttttctaggctttttatgcttctatttcacagacatcccacctgagttctaaatttatttctcaaagaagccaagctcctgagagagaaatgatactgtaaggtaagagttcagaaggaaacacacacagatacaccctgacaaatcacactggctgtcatcccaccaccatgtagtctactaggatttcaggtgggatgagtaaaaatgtagaattaaagtgattctttcaagatcataataattaataattcctaaaatagaattttaaaattcatcttttatgggcctgtatttttgcctactgtggtattacagatatccgcttatacccctcttgcatttcaccaaaaacactttggttttgtactgtggcagacaatctaaggaaatacattttatctcttctacctgttttttccttgctctatttcaaggcagaattcacgatttgaaattccttgccacatggatgttagtctggcagaaaacataagcaatcttaaatccaaagctttttttggctttatataaaaatctcagccctttagaagaaatggagttccaaagttggtgagaaggggagtggttctgaatgcagggaaagagttgagtcagaatgggaaagggaggaaggacctcaagccccgcagtctggcagttccagggagagtgatcaggccttagaaaggaatagttcgtggttcccagccttacccaaatccccaaccctaagtgagacacagaggctgtgtcgctagacataaagagaccataatagatgtattcagtagtagagcaaaaaattcaaggatcttagatggatccttctgctgttttattgttttctttgccttctcagtgcctgatctgagagcgcgtgtctatatgtgtgggtgtatgcaccttatgtgtgtgcgtgcatggtggtgggatttagaggatggggccaagcatgagtaggaattccaacggagtgagtcacaaagttgaactaagttgatttaaagaaataaagacataatagtctttccatatcaaagtatatggactaaattgatctcggccatagttgaccattaacgattatacataaagaaccaaatttcctggtttgaatataagtggaagccattgatttttctaggaagttgaatacattatgcttatcatgtataccttccaaaaagttacctcatgtcaaattgtgcacaaattagatctgtttcctaacttgccgaatgaagttgtttatggttttgaaacctttccccttggaaaggtgcagtggacgttactctgccaaatctcaaaatgcactgattcactccacagatgtttacagccagtgtttacatgtgtttaccagtgtttacgtgtcttccatcaaccaagcactgaccttggctttggaatatgatgctaaatggcatacagtccagctcccaaggtactcagaagcctgggacagggaatctacttcaccctcaaatttcttaccctatggaggaatccttgtatttaacagagaccagccaacaaacagtgccccatactggaatgtcagaatgggaaggagagagaagatcacaagcgtcttgtgttgtgaacctcaaaccctgaaatctggcagcaccagggaagagtcctcagaaagaatggctctgtggttcccaaactctcccaaatccctattccctaagtgtaaccaagtgagccaagcaaatggtcatccctctcacttcacctggaggtaaatttgtgcctgaggccgattaccgcttcctgttccccatcatgatgtcaaaatgcaaatggcaggtatgatgaagatgagcatatgatagaaataagactgtatttcacaaaaatataatcaaatctttatatttcaaaataagcttacagatctccacctaatatgacttcaagtaaatttacattatgtggacctaccatttcctaagtatttgctatactgctccatggctctgtcaaatgtctcttcagactcttagatgggattattgccatctacaaataacttctgcttttttaaaaaagtcattcaacaaactttatgaaaccaccaggaactggatcaggtggtggggattaaggatgaaggccacgctctctgcttatcttaaactcaatagctttccttgattatatcaacattttttcaactcctttcatttaaagaatacattttttttgaaaaagcatttagttatgattcagaaatatagcaatatagtgagataaagcttatatatgtgtatatatatgtgtatatatatgtatatatatatacatatgtgtatatatatatatacgtgtgtgtgtgtatatatatatatatatatatatatatatatattttttttttttttttttttttttttttttttttgagacagagtctcactctgtctcccgggctggactgcaacggcacgatctgggctcactgcaaactccacctcctgggttcaagcgattcccctgcctcagcctcctgaatagttgggattagaagtgcgtgccatcacagccagctaatttttgtatttttcctggagatggggtttcaccatattggccaggatggtctcagtctcttgacctcgtgatccacctgccttggtctcccaaactgctgggattacaggcgtgagccactgcacctggccacttatagatattttttaggaggtaccctaagccagacttttgccctgaagacttttctactctgcagtgtttatttttctgtttcaagatgtctgcagcagaaagaataatgcaaaatttcaacatcagtgttattctaaaaacaatcatatgaaaaattcaggttccttcaataacgactaccttgaaaaataaaaaattcagtcacgcagttggtttttttagtcttgagaatatcaaactgtgtgtgactgactttcactaaattgactagtcactgttgaatgacatgccccttagctaggacagcctggaaaattgttttcaaagcttttgggactctttcactccaatttttagcacagattcaagaatatctacttagctaccaggcatcttctagggtatagacatttctgtacaaaggactgatcaccctcttcactgagccctctccagagtgggacttcagttgcttagtgtaagaaaactagtcttttaagtcacttttcatttccttataattcatgggttttctcacttcagtccctgtcagaggtcagaatgttttccctccattcttcagcatcttcatttgcctacaattattgttcaaaggtaagttggaagctgtccataggaagaaatgtatgatgtagtacatgacacaatagtcatgtaccttatgtggttactgtagcttgcagagcatcagtcttagtaggtgatcagtaactggttgtggaataaataaagcaatgattgaatgacaatataactgaagaatcaatgggcaatgcatataggagttactaagtgtattcgtccattctcacattgctatacagatactacctgacactgggtaatttttaaacaaaagaagtttaattgactcccagttccacatggctgaggaggcttcaggaaacttgcaattacggaggaaggtgaagggaagcaaggcacatcttcacaaggtggcaggagagagaaagaagggaaagtgccacactttaaaaccatcagatctcctgcgaactccttcactattatgagaacagcatggagaaactgtccccatgatccaatcacctcccactaagtccttcccacaatacgtggggattacagttcgagatgagatttgggtggggatacagagccaaaccatatcactaagtaatccgataccataagaattacttaaatattttttaccacattacgtttttttcaagtaagaaatgttttcaattctgatgttagccaacttagggtgtcttattgttttccccagtgaccaagcagaaaacaaaatgctcaaaaaggatcagagaagagagttcaacaaagggattgtttacaatcatgtgggtggggttaagtgcagtattacatcaaagaatagtgcagtactttggagtcagcaaaagctggagtgctgaggggcagggggaggaagcagttagtgactggaacatagagtggctgcattaagagggccatccaataagaagagtgtccttgggtggaaggccagagccagcttgtgatgacttgccaggaaggttgctgttggaataaaagtgcttacatcattctgcactaaactttcaatttcctggcaagtatcttccattggccaaactgaaagctggagggcaaggaagcttgttggtgcagtccctagaagttgaagtcttggatttcaaaggaggatagcgaaggttggaaagcgaatctggcgtggggggtggggcaaaccccaaatatccaggtgccttctctatttattagctgaggtggttaattggtggtcttccaagtattgacagtttccttccaatctttatttgtgcaggataatatctctttcagaggtagggaaaacatgatggaaagcataaatttcaaccatgaaattccatgccccctccctcacagaaggtattgtgacagaaaagaaatgtagaacttcaattcactttataagtaccgcgtgctaaccaattgtgccactggagccacagcactcaatttattttagattcctagttagcataatttgtagaaaatcaaagctagacagtagtgatgtctctcaaatttgtttgacaagaggtctaaaaattgtccatatgtgtattaggctgctcttgcattgctagaacagcacgtatgaatatcccacacatggatatcccaagttttaacttcagaggctgaatatgtctgatcgcattgcagaacacaataaatcatcttgtctcagagaaaatcctataattaggtaattggcattgatacggttgacctaaaagggaattgtggagtagaggtttgcttgcaatttctttaaaatacctgagtctgggtaatttataaagaaaggagatttaattgtcgtagtgttctgcaggttgtacaggaggcatgatgccggcatctgcttggcttctggggaggcctcagggagcttttagtcatggtggaaggcaaaatgggagcttgcacagcacatagcaaaagcaggagcaagaaagagtgtggtggagggaggtgccacagacttttaaatgaccagatctcatgagaacttattcactatggcaaggacagcaacaaggggatggtactaagccattcatgagaaatctgcctccatgatcccatcacctcccactaggccccacctccaacaatggggattacaaatcggcatgagatttagaggggacatatatccaaactatattaatacaatcttttgccatgtatatttagaaagaaaaatgtcttcaatttctgttttgaaaaaatgcattagtttccctaaaagtgcagcctgatacatagatttttaagtacatctctaaggacatgaggcaagcaggatgacacaggggaagaaactaaggaaaggtgtggttacagctgacctgtggcctcagcctgatgccatagggaactctggagtgtgagcggtgcaaaaaattatcctgcaaggaggctggccacataatcagtccttagctgcagctattccaatgatggtggaagcttgggcctcagctatgtccaggaaaaggggctttccttggccaaggccaattatgcagaagacagtgtatccatgagccactgaaaacccacacttacgacagcttggagatgggtgcacagatgcactaaaggagatctgggcagggcacaacatctactagatatatataagtttgtaggcagaatcctcctcacccatgaatatcaccaggttttaacttcagaggctgaatatgtctgatcatattgcagaacacagtaaatcaccttgtctcagagaaaatcctatacagcaattaggtaattggcattgataaggttgacctgaaaggaaattgtgaagtagaagtcttgtaatacgacagtcttttgaagcctcccattaaaagccccctaccacctatcatatttttccccctcctcatggcttactctacctcctttttatgcctttccactcatccagaggttgttttgagacccagtcctacctggctttactatcacaagagtactgattgatatggtttggatttgtgtccctgcccaaatctcatgctgaattgtaatccccagtgttggaggaggggcctggtgagaggtgattggatcatgggggtgggcttctcccttgctgctctcatgatagtgagtgagttatcatgagatctggttgtttaaaagtgtgtagcacctccccccgcccctgcttcctcctgctccagccgtgtaagatgtgactccttcctcttcaccttccaccatgattgaaagtttcttaaggacttcccagctatattttctatataacctgcagaactgtgagccagttaaacctcttttgttcataaattacccggtctggggtagttctttacagcaatgcaagaaggaaccaatacactgatactaagatgttagctgagatggtaactgataagatttaatcaggaggatgttaaaatgtttacgacatatatactaaccaatcagtagtagccaatcagaccattctatggttagagcttccttactgagccacgtattaaccattcgttcattgccaagtcattaagagatagagtcactggaggaggtactgagacagcccaggtagagtggaagggcactgggtttggggaggctcagggcataagctgattaacctgctggaaagtatttcattatggctataccagtacctactgactaaatatcagcccagaagagttgcttccgatataatacgtttttattgttattgttgttgttgctttaagtaaatcctaaataactgtgactttgaatcttggcagttcctggaatcacagaagtcagaaactcataagaccggtcccagatacaattataatcatagctgtaacttaacactaaatcaagattatcacgaagcttttgcatctagtttaaaacagtaagttaaataggaacatagaaacatacttattgttggaggtcattattttttaaaattgtgttttttcttcaacctttaagttccagggtacatgtgcaggatgtgcaggtttgttacatagacgaatgtgtgccatggtgatttgctgtacagatcaacccatcacctaggtattaagcccagcatcaattagctattcttgctgatgctctcccttcccctgttccccctcacaggttgcagtgtgttttgtttccctctatgtgttcatgtgttctcattgttcagctctcacttataagtgagaatatgcagtgtttggttttcttttcctgtgttagttagctgagggtaatggcttccaactccatccatgtctctgcaaaggacatgatctcattcttttttatggctgcatagtattccatggtgtatgggtaccatattttctttatccagtctattattgaagggcatttgggttgattccatgtctttgctattgtgaatagtgctgcagtgaacatatgagtgcatgtatctttataatagaatgacttatattcctttgggtatatacctgggaaagggattgctgggtcaaatggtatttttgcctctaggcctttgaggaattgctatactgtcttccacaatggttgaactcatttatattgccatcaacaatgtaaaggcatttctttttctccacaacaacagcagcatcagttgttttttttgacattttaataattgccattctgactggcatgagatggtatctcattgtggttttgatttacacttctctaatgatcagtaatgttgagctttttaaaatatgtttgttggctgtatgaatgtcttcttttgagaagtgttgtgttcatgtcctttgcccactttttaatgcggttgtttttttttttttttgtaaatttgtttaagttccttgtagactctggatattaggcctttgtcagatggatagattgcaaaagttttctcccattctgtaggttgtctgttgactctgatgatagttccattggctgtgcagaagctctttagtttatatacttgcattttgatagaaaggtagatataagctttctaacaagctgtaaccttgaagaaaatggacagtaggcaatcttagctggtatgtaagtaatcaatgctttttctgatcataactttaatgcacagtaatttaatggacagtactgctaatttatttttttccagcatcatttgtacaaagtctcctaaaatccatcacagttgagaacagtctagacagttattatgacacaatcaaaaggaaagctggcaaataaaaaaagaaaagtgaatagaagagctgattaaaataacagtatagtttataggaggcttctcttaaatttgtgttttgcaaatttcaatttttggaaggctcaaatcacattaaaatattttactactacaagtcagctttcttttataggtctaaagaggaaagagggaggggttgcatttacttctccatagaaagatttcagcaatctaattaaataaatattatagcagtgcatttgaatagttttcccatcagtgaggaaagaaaatgctctatttccctgaagtcagacatttatgtcacagttgaagaagggcaagtcaaccatcacagaatgaatagttttgtcaagtcgatatctgatttgatggagtcgagttttcttaatgggaactaaaactgtgaaatgcacattaatccactctctgcacaccatctttccctttaaggttccagaagaattcctatttccgttttaaagccatctgctattgctttttgccagtgagtatgtggatagataatttctcagggtgcaattagaggaacgtgaagaaactacttcatgccataaagggagctgaaaaagctaaagcataaatggcaacatctgcatgaggtatggagccagggaggagacagaagcatgcaaatcagtcgcgcactctcaacagaattccaaggtccaaaaaacaatctgggaagatgtttacagaacacaaactcatccacatcaaaggagtagaaaagatgaataattggtcaggtgcattcctgtggcaaggaaaggcaaaagcaactcaatcaattctgaaaaacaaaacaaaaccaacccaggataaatgaaaagactagttgaaacgttctcatcttggatttgaaatgactcaattggttaacatgtaatttcattaagtcccaaatcaaggagattgtcttttcgtcactaggatcatggttttgttccttttagtctccatgtcacgtacccctcttgtaagaccttggcaagtgagtgttgcagcaatttttttccggaaggtgggctccactccttcatatgggaaagtcacaagtttggctagcggtgatgagatttaatttcactaaaagcttatagctgaggttgtgttctcatattcaatacaaaggctgtcttctagacaattaatgtaactcttacatcctctttaatttggctctaaaatatctctttcaattactataattctctgataacttctaacttccggatggactgcttgaagcatttttccctacttcagaataatgttgggaaagttcctcattaagtcttcgttttagttgaaaatccagaataatgcacccttggtcttatctcacatatttttgtcattctgacctcagtgcactgcaatctttggacttcaagtcccaagctaagaattaagccagaggcaggagcatctgctcatgttatttttgaatcaatggcagcctctcctcctcctcctcctcacacctacctacttttccacctcttgaaaggcccaattcaacacccatttcccccttaaagcctttcctaatcacactagtatttattagctgcactgagctgctcacagctgcacttgtgagccttctcacctacttcatggctggagttctcactctagcctgatcagcaacactgggaaggcttgtaaaccacagatggctgggcatcatccccagggtttctgacttagtaggtgagggacgaagaccaagaatctgcatttctaagaagtccacaggtgatgcagatgatgcttgtctggggccatactttgacgatctctgctgtagtgaatgcttgctacattcttactcgtccattaagactcccctctgtatcatctttccctgtcagaattaggcctctctcaacctatacctcttaactcacaaattatcctacctcgatgaaggcaggctagcaagctcagacagctaatgcagccaggaagtttgcagatgtatgcatctggtgagacatcagacatcgaaaatgatccatgatcttcccaatggatcataaacatgctcacagagtagacaccctgttgagacagggctacatggtgaccaggcttgggacaagacagagataaggccacactgctaacagaaaaaaggctaaagatccctccttccgtttgctcctttgcccgcgacaactcaaacctcaatttcaccttcctgcctccctcctagataaaaattagtaagctaatcagtcacaaaaagaaaccccaccttttgacggcctccaatccaggcctgtttccagctttcttaaaccctcctacacagatgcatatccttgtaggaagcgcctcccgacttccttgagaggacctgtatttcctctgctgtgtgtttctcctgggctgcagcaggttcaagaacataaactctttcgccccaagctctgttcctgctgctctctgctcactgggctgtgcagacagacagtagggatgatgtgcccctcctgaaggaattcaaagtaaacacaaatttaacattgtgcaggacaggccacagggactatgagcatgttgggtaggcagaacattaccagcttgcaggccttgctgaaaggctcaagacctcaaggccttgccgaaagaaccctattctaaaatctctgacttctccaactctcatcagtttttctctctcttctccgacaccctgagagttgggtatgaagaaagcagcaaacatgtgcattgttccttaagatgtacaatgcatgtttacaacccttgcctcgtttaattttcatatctgtaagctaggtatagtagatccagtttaaagatgaggaaactgatcctcagagacataggtgttagaacaacctcacatcaataaagtgaccaacttcatacagtaattaagtaaagaaatcagggtctgaactgagtttcctgtgctctttttgctagaccacgatacctaaacctcctgggagcaggcaactgagcaaaaagatgctctcctatgctctcgggtgttttattttccttcccatctagacaataccatcctcagttagagaccacgttatgtatttctctggcatcctgcctagctggatctagtggaatgctgagcacatagcaggccctcagcaaggagtcactgactgattgaaactcataaacctttctcacaaggagacagaggggagaggctgttttaaaacagaggaacttttctatctttgttccagcattgcaatactagaggctgttgttactttaattcttcagggtgctcggtattaaagcatttttcacacttagaaatgtttattttcctgttatggtttctgcattgaaaaaggttgggaagttcaaacttcagttccacgtacgtttttctgaagtttcatgaatatttagaaaatgcatgtagaacatgtggcagacactgtgctgtgtggtccatatcccccctttaaggaaagacttgttgtcccagctgttgtgagtgttgttggcaccagccttcagccatcagcttctcaggcactgcctgagctacagtgagctgccttgcccaagggtgcacccatttctggagtggtccagatccagggactgctcagtgaagatataaaatcctggccatcctggcccaactcaggacaacactgaaggggcaggacttcagagctagtcctggagttggttgaagctgtcgttgagtcagcatcatgactcagcatttttctgctacatcctgctccctttttctccctcccttaggtgtcgaacccaagggctcttctcagcagagtgtctgcatgccacactctgctttagagtctgttccctggggaacacaaccagagactgaaataattggtgggcagtggggagcacaaagggctgtttttgtttcatgtgaagacgatgagcatgctatgaaccccgaagagctgttgtataagcaagtagaatgtgtttggctgtggtgtggtaaagctgactgtgttacacagagagtgggtgggtgtgtctgtggctttgctcggcgttattcatgcctctgcgcccttagggtgataaatgggtggctgcacaggctggagaagggctcctgaaggaccctcagacattctcagcatttgcccagcggctgaatgtctttccacgccttctccccttacaactaagtagacagcttccttgcttttgtaatatttgtgtaatcttgatcatttgcaatacgacgaatagggcagatgtgcaaccttacagctctcatattttctcctaacattgctggaaatttctgaacttctgattgtgttcatgacaagacatttttctttcattttcacctaagttcaagcctggtttataaggattttaggtggtcattggttaaccctggggatcctttattcttccctggaactaaggtagagaccttcctctaatgagcatagttttggctgtgatgtccacaggggcaagcaagcactccatttgctgctttgagtgtcctgtcacttagataaatttcagggcaatccttggccccaggccttcccctggagttttcttagcaagactaatttgatatattacctccacaaatcctatcagccctacccggtttagggctgagggtgaagatagtttataggggcaataacaacagaaatgtcctctctgagacaggcaaataatttcctctctgctccagtccagtactatttcccttaatctttttaatgcctgggaagctcttgcttccttcctctgtcctcagagccagttttctctcctcaaggttaataccctgaaaagcgagcaagcctattgtttctgcttctctgggcaggcagcacattttctatagtttcatctgtctctatattaaaatggcttagggttgaaacaaatgactcatattcactggtggtccaggttaagtgaaggccctaggttatctcatcaaagggttctttttttttaaattttattattattatactttaagttttagggtacatgtgcacaatgtgcaggtttgttacatacgtatacatgcacacgtatgtttattgcggcactattcacaatagcaaagacttggaaccaacccaaatgtccaacaatgatagactggattaagaaaatgtggcacatatacaccatgaaatactatgcagccataaaaaaggatgagttcatgtcctttgtagggacatggatgaagctggaaatcatcattctcagcaaactatcccaaggacgaaataccaaacaaattgttctttaagacagaatcaagctgcttatccaagccttactggcttctcttctccctgggcagggatgctaattaccaccagcctacttatctgatttgtgtcctggaatggcccagtcctcagtatttgttggcacctgactcagctgggtttctgctggattctcccttctcccacaggcctgcaggcttcatatcttacccttcttcctacactgagtagcttgtctttccaccttcccttccctgccatgaaagagacttcacctgaatttctggacctcacagcaatcagtagatgtcttctctcccctagtactgcatcatttacaggaaggaggtgctagatctggataaggcaagccccttcttgaaacttgggagacttaaatgaaacctattttggccaggcatggttgctcatgctggtaaccccagcactttgggaggccgaggcaggcagatcacttgaggtcaggagtttgagaccagcctggccaacagggcaaaaatccgtctctactaaaagtacaaaaattagccaggcatggtggtggagacctgtaatcctagctactcaggaggctgaggcaggagaatcactcgaacacgggaggcaggggttgctgtgagctgagatcgcgccactgcattccagcctgggggacaagaacaagactccttctcaaaaacaaaaacaaaaattagctgggtgtggttgtgggtgcctgtagtcccagctattcaggaggctgaggcaggagaatcactggaacgcaggaggcggaagttgcagtgagccaagatggtgccactgcactctagcctaggtgacagagtgagatcttgtttcagaaaaaaagaaaaaaaaattctatttcatttcactatgtaatcagtgcttccattctcatactgtaagaaacctccttttcggcttagaacagtttttgaatttaatatagaacattcaccattctgccctacctgtccaaccaaccttatgggttttttgtttgtttttggatgaagacatgtttgtgttctgctgccagtacttacactgaaaaaggaccaggacaccctcaattgcttaccctctgcctgtaaccaatccctccaggattctactattttttttttccagagttatttttggtgaatgtataatgaatggaatgttttgataactttatggtaatcatccatgtggtacatagataactagaacataaaactttaattatagagtattcttttactatttacaattttccctccccttccaacattcattgaattgctaatagtttctgtgagaaaaaatggtatgtgtggttgagattcttgacttaattcactgcctttttagtagtcccctttattttagctattcatgtctagattcaaatgctgtcaggaatttatgtaagtttttaaaaagtccaagaaggtatattttaaaaggaagttggggctgggagtggaacacctttgatctctttctagctgtgtgatctgttcagtgtggccttggtccagtctctagtctatctgggtgttagtttatttgtgaacaaaatgaacattttgtaccagatgatgcccagattccttccaggtttagtattctttttgtatctgtgataagggtcaacattttaaagtgttcaagtcacatttgaacctgccatttttaaaagcattgcaatctctttcattcagaaatagtctttccatacacacacgctgattagagaactgcttgagggacaactctcaaatgagactcagatgggaaagtacaaatgggaggggagatttgagtttcaaaaaattgaatgaacatttcataggttgttagcagatatcacagatagtaagcagatagaactctgaatgctgggaaaggaaaaatgactaaaacaaagcattgggtagatttcctgtttctaaaagtggtatgattgtaaaggttgtacattgattcttcccactgcaatgaactctgctaagaatttctttgcaccaaatggcagccttgtcaccttgaccttaaatccttcccataatcctttcttaataatatgcttggtagaacatattatatatgtaatgtatgtactttagttaccaaatcagatatatatacatacacacacacacacacacacacacacacacatattatatgcattagatacctctgtgttttggtagctaaattacaagtataacatcctgttatttataccggctagaaacagaaagctttccgtggaatagagaattggctttcacagacatttatttttcatgtcacattcttcttctactcttgcttctaatctgaatccaggcagatcctcttttttgaacttgtgataactaaggacatttgttcctttctgtgtaatcgcttcaaaccttataatccagttgagaatgcctgtctgacatattgagcaataattaattcccttaatagccatttccatgagcaaggctttctcttttccagacggtttctattagtctggtcatgtttttttcaacagctgcctacagctttcatgccttttcttttcatacctgatttacttctgcctgctattgtcttctttgcggctttcactttactcctagccctctgtcctctgtccctaatcttatttccaatgtcttagtctccagttcgataattcacatttccttgtctcactgatttcttctcattcaattataattttgacatttctaaatattgtatttgtatttttttttggtagagatgtggtcttgctacactgcccacgctcatcttgaactcctggtcccaagtgatcctcctgctttggccctcccaaagcactgggattacaggcataaaccaccatgcccagcctatttataattaatattgctccagtataacagtggagcaaagacatatacaataatattttgaacctacttgtatagaagagacattgcttccatggactctagaagaacaagctttttctctagtccaaagggttgattatctaaactagataatattttgaaggtacctagcttagggttagacatctggagagtactctgtaaatggtgattccatttcatcctcattgtggaatttcataaactacagctggcagaccagggaagatatgtgctcaagaaagtgctcttccctgaatccctcacgtcatattgttagtgcctcttctgcttattcacaagaccagtcatcatagaggttggatttgaatcttgtatctgtatataatagaagccacattcaaactatgtgaagcaaatgtggacatgggaagatattaaggagtctcttgcaatccaaggtctaggattcagggatgcctgcaattagggctagcgacaccctgaagactttctcactctgttatttctgcacatctattttattcctctttccctaaagtcttgcttctcattctcccacagcttgaaacaaagactgacatttctacaaaccaggccttccaagagagattggctttcatttccaggttcaacatcgccctggaagaaattggttcttattcatcttgtgtgaagttctcacccttagacttatctggaaggttgaggttttgggggagataattacacacatgaactctgagacaccacattctcttggttctctttgtgtcctccccccaccaccatccttcttagctcctttgctgaatcttccccatgttactgtctctaaacactgggaacttaacacatgaatctctcctccgcctatattcactctctacaccattttatctagtcgtatggctttaaatatcatttaaatgccgatgttccccgtggtgatatctttggctttttctgcatacttgaagtctgtactcactcatctgcatacttacgtatagaacaggggggtaggaaagagcacagaccctgcaatcatgatgcctgggttcaagtcctgtcttcatcagccaacttatgtgaccactacagattacttgccttcgatgtgcttcgtatttctcatctgtaaaatggagttaacagggccaggcgcggtggctcacgcctataatcctagcactttaggaggccgaggcaggcagatcatgaggtcaggagattgagaccatcgcggctaacacggtgaaaccctgtctccactaaaaatacaaaaaattagccgggcgtggtggcgagcacctatagtcccagctactcaggaggctgaggcaggagaatggcatgaacctgggaggtggagcttgcagtgagccgagatcgtgccactgcactgcagcctgggcgacagagtgagactccatctcaaacaaacaaacaacaacaaaaaaaatggagttaacaatagaccctacctcaaaacatttttgtgtggattaaataaaataatgtatacgagtcacttagaatgggtcctggcacatgggaattactatataaatgtttgctgtcattatttccaggaatcttgaacatataaaatctaaaatcaaacaattatctctcatctttctctcaccttcagaccacaaagaaaataactaatgaaatgctcttccagacatttaattttcttccctcaacctctagcgtttcctctccattctttactctcagattttgatcttgcttcttatttcactgaaaaaaaagcccacttttcctactgactttctcaactcaaacaaaaacaatgaactctctttctctaggtatacacagcaaaatcactggtgtcagaattggcccatttttgtggggcatggcggctagttgcctgtaattccagctactcaggaagctgaggtgggaggataaccggaggccaggagttccagacacctgtgtaacaaagtgatacttcatcccttaaacaaatatagaaaaagtaaaaaaaaagtcagcattgttctttttaatatctcatgtctaatctgttagcagatccggttctctacagaactcaataattttcaccaccattactgccccactccaagaaatgtccagtctcctcttgattgaacagtttcaagcagataattaatctcccagtggccatacttgctcctttccattcttttatacttagagcaacccagctttctttactaaagtctcacctcctcgagagcaggaactttttctcttttggctcctgttatcttcccagcacctagaaaagtgcctggcatgcagtaggtacacacacacacacacacacacacacacacacacacacacaaaagttcaatgaaagaacccactaatctgtaagtttattgccaacccagcttcttggtttatcaattattgtatttcttgaccataatgctctgtcaagcaaggagcaggtgctcaaaatgtatttgttcaatcaatccctgagttactacggaggaataatacaagcacaaattcctccttctacttcctttcacatgttgtctttttgttctcctcattgtaagggcaacataaaaactcaaaggaataaatctttctcgaactaataaaggcttatttgtaagggtgacgagctgcagatcaaggtggattaaacagagctggaggcaggggttccattgaatagaaacacagaagcagagctgcctgggagactgcatgcagggaaatgatggcaggagctctctccatgggaggttatagcagctcttgatggaggaaaatgggaatctgtgagttcttagaagctgaagaaaaaagatcctggaactttaccatagtaagtaatagctttgttttttcttctttcatttattcttaccttcccacttacttcattccttctttttttcctttcctttgtcatacttgtactgaaattaagaatttcagggttttgaactagaggtctatgaattctgaccacatactggccatttttttttatgggaaagttctttaaagttcagtttccttaactctagaatgaacctaaaaatacctttctcagagctttattcgaacaagaaaatgagatgatatataaacaactcttaaaacattgcctgttttaaaataagtttaaatatttatttaaaaagtaaatcctcagtcaataaaggaaatttgcctctattaatgttcctttactacaacacatatctgattagttattgatatgggttggctgtgttcccacccaaatctcatcttgaactgtagttcccataatccccacatgtggtgggagggacccggtgggaggtaattaactcatgggggtgattacttccatgctgttctcgtgatagtgagttctcatgagatctgatggttgtataatgaacttttccccttttgcttggcacttctccttgctgctgccatgtgacgaaaaggtatttgcttccccttccaccatgattgtaagtttcctgaggcctcctcagccctgtggaactgtgagttaattaaaactcttttctttataaattatccagtctcaggcagttctttatagcagcgtgagaatggactagtacagttattttactttgttgattataatcctaaaataacttttcagagcacccaaaataagtttagactcctcactgcagcttccatgaacttcataatctggctacctctggtttcatctacttaaccaccctcatgtgccatctcttcaccagacacgtgggaaaactgtggtttcctaaatgccctgttgtatcctcagagtacccgcattgttgtcacctctatctagaatgtctttctcctttttagaagattcctattcattctttaaaactcagctcaaacctcaaaagctcctagataatgatcactttcgccgcagtctcattcagaggctcttccacgtgaatgggaataatacctttggtgtacccccatccacatagtgctacattgaagctttctcggattgttctattagtgttttttggcttcactgtatccccttgccctacaatctagtgccataaactccataggtacaagaacttcatctgtgtcttcacctcttcagatgcctgacatgcatgcaatgtggataagctgaggatacaacaggttgttcagcaaaccacaattgtctcatgtgtctggtgaagagaaggcatgtgagggtggttaagtagatgaaaccaaaggtaggcagaagccagtttatgaagttcatggaagctacaatgaggaatctgaacatattttgggtgctctaaaaagtaattttaggattataatcaacaaagtaaaataattaatagaagggtttctttatttattgaagatttatttattttaaaaacaaatggcaatgttttaggagttacttatatagcatctcatttaattcttctaacaaacctttaagaaaaatattattaggttcattctagagttaaggaaattgaagtttagagaactttcccataaaaactatggccagcgtgtgctcataattcacagacccctagtttaaaatctcaaaattcttaatcactattctacttgtggctagaatagagactgaaatgggagagcagcacagtagatgcggagaaatgaattagtatgctatttcactaaacttggaggaaaatgatgagtacaaataatggcagtgaagaattaaggaaaaaatgactttgatacaaataaaggagatagaatttatagaatggtgactactggatgaggaagggcaagtgagaggagagtgtttagagtggctgtgaggtgtatggccatggccactgagtggcaagcagggccattcacagagatataggcggatcaggcttgggaggggctcagatgcattgagtgtgagggtcctgtaggacatcagcagttgtatataccgggttgaagcccagtaagggatcatgagttataggacaaccatctgcacatacacagataagctggcttagggatggttagtggactgagtagagccaagggcttaagatggagccttggaaacctaaacattgacaggaagaaaacctataaaaggagtctgaaagggaacagaaggagaagtgggaataaaggtagaagagactgatatcctagaagctaaggaggaaggattctgaatcaaggacatgtccaacaatggtaaataccacgatgagggcaaacaagataaaaacagaaatatgttttctttatttcatgatatcagggtcattgttcaacttatcaaaagaaatgtactcagggttaaggaagctggatctatctggcagatgaaggagtagatagaaagtaagggattggcacagccaaggtgtatgaaggtatggcaaggtcaccggagcaggacaggggtcaggggacgattattgggaggggactgtggaggtgatgtgagagaggatggactctaaggaaataatggaaagattattcttggataacaattatgttgagagacctcagagatagattactgacttgtttcaaattggtgtgtgaggtgagggagaagagatgctatctatatctttttcagcttatttaggcttgcaacctggacaaatactgctacatctttacatgtaaaataggttttctttccttttcatttattccctgtttatatccctttctttctacctactaaagcacaggagcttggagaatagaagctctgatcttaactccccaccaacaaatttgtttttcttcactgaagtcgatttcttctttcagcacattagtattaacagtccccatgacaatgctaccaggagaagattttgagcagggttaggatgctcatttgatactgcactgtatccagagttatcaacatgtcaagttgactttctgtttctgtagccttgatccttcctttagaaacaggatagatcctttatactgactttagttacacttgattgaaagactaagcaatataatattttgagtatttcagtataggaatcacaaaacagagtctccctttcttaactagaacagggacacaggtatttataatcacatagagggaccatggtgaatattccctttgtgttcaaaagtgaggctttaaataagtggcagcttattcatttcagatgcattttattgcagtggaggaaggaggagaagcaagtgaagacaatgaaggtaagatggttaggaagcttcagatagcgttgtttctttatacttcaggggcagaggatgatggaagacgtaggatctgacgttggttctgccctttggaatttgtacgtaggctttagcttttcccaacaataagcacggcaatctgcaatttcttcacatctgagtggcagtgacttcactcataggtagtatcaaatggcctgcaaccagtggcatttgcttattctgccaaggtattatgccaacactgcctggaatctatgctcattatggtaagcataacttagaccagttggtcaccagtgaatgtgtaagaactctagaatctctgacactgtctgctgtgaatactcaatgatagttaaaaagttgctactgacagggtggaagcctgcagccagtcaatcaatgagtagtattttggagccttacttagctaaacttaacaaatatgtgaatagctgtggtgagttttttgttacacgttaggattgaggtttgactgctctcctgttttccccagaagcccaggacaatgaagtcactggttatttgcacatttgcaccatttcactacttattaaaagtaacaactgaaatttgtattattccttctgttcataagttattttcccatgttatcttatttgaaactcaaaacaatgttaaggagaatagaattattcttgcaaatttagagatgagagaaaacaagcctcaggatgctccagtgctgtaactaaaatcacagaaccagtaagaggccaaggggaaacttggtgcctgtcttgttgttcttaacctggagtcaggaatctttcagagttttgtgagccagtgaaatcagtaggtttctggggttaggagttccagaacaaagagatcttggagcttgatggagaatgggcttcttagtattggtcattgttgagatcaaatgcagtaacagtagcaacaaatagctttgccattctggggaatcttgtgcctcaaggaattgcaaaacccttcagccctaaccaggcttggataaagtgtgttcttaggtctcatctagcaaattctattttatgcggggcacggaagcttaaaatatttatttttgcatattttacataagcaggtaaaagaagatgaaaacaagcacaattgaaagaataatcagtttgttacaaattttttcctataattcaagcatagaatttcttttgtaagtcaatcttctaaaagaaatagaagttttaaaataaaataatattttaatatatgacaatttaggaggaggcagagcaagatagccagatagaaccctccagcgatcatccccctggaggacatcaaattgaactattcacctaagaaagcaccttcataagaatctacatcatggccattaaaaaagcattggttaaataaatatcgatacttccacattatgaatcaatacagaggttttttgtctgtttgttttgttttattttggcctgcctctgctgcttaggctggagtgcagtggcacgatctcggatcactgcaacctccacctcctaggctcaagccatcaagtagcttagaccacaggcatgcaccaccgtgcctggctgggatcacaggcatgtaccaccacacctggctaatttctgaattttttttttctagaggcaggattttgccacattgccaaggctggtcttgaaatctgctcagctaaacctcctaaactgctggggctacaggtgtgaggcaccatgcctggcctcactgcagagttttaaaacttgatagtgttgaaaatatctaatgaaacagaaacacatatacaattaatttttatgttaaaaagcagcatatacagcactgtgtgtgtgtgtgtgtgtgaatgacacagataaatacaaaatcttagtagtagctacctctggttcagagatatgctggttggattttctgagaggtagacagtgtgataaattgaagagtgcgataggattattggggactcaacaaatggtgttgggcaaactgagtatccacatgtaaaataatgaagttaaatgtttatcttacattatatacaaaaattaactcaaaatggatcaaagacctaaatgaaagacctaaaactataaaactcttataagaagaaacataagggaaaaacttgatgacactggttttgacgccaatttcttggttagaaagcacaggcaacaaaataaatataaataaattggactacatcaaaattaaaaacttttgtgcatgaaagtgtataatccacagagtaaaaaggcagcatatggaatgggaaaaatatttgcaaatcatatgtattagtctgttctcacactgctaataaagacatacccaagattgggtaatttataaaggaaagaggtttaattgactcacagttcttcagggctggggaggccacagaaaaccttacaatcatggtggaaggagaagtaaacatgttcttcgaatggcggcagcaaggagaagtgccaagcaaaaggagaaaaccccttataaaaccatcagatcttgtgagaacttactcactatcatgagaacagcatggaggtaaccacccccatgattcaattacctcccactgggtccctcccacaacatatggggattatgagaactacaattcaagatgatatttgagtggggacatagccaaatcatatcattccaccctggcctctcccaaatctcgtatcttcacatttcaaaacacaatcatgctttttcaacagtcccccaaagtcttagctcattccagcattaactcagaagtccaagtccaaagtttcatctgagacaaggcaagtcccttctgcctgtgggcctgtaaaattaaaagcaagttagttacttcctagatacaatgagggtacatgcttatgttccaaatgggaggaagtggccaaaacgaaggagctacaggcctcgtgcaagtccaaaatccaatgggtagtcattaaaccttaaagttgaaaaatgatctcctttgactccatgtctcacatccagggcatcctgatacaagaggtgggtttccagggccttgagctccattcctgtggctttgcagggtacagccccctcccagctgctttcatgggctagctttgagtgtctgtggcttttccaggtgcacagtgcaagctgttgttggatctaccattctggggtccagagaatgatggcccttttctcacagctccactagggagtgccccagtggggactctgtgtgagggctccaaccccacatttaccttccacattgccctagctgagggtctccataagggctctgcctctgcagcaaacttctgcatggacatctgggccttttcatacatcctctgaaatctaggtatgggtccaaaacctcaattcttgacttctgtgcacctacaggctcaacaccacaaagctgccaagtcttgaggcttgcaccctttgaagctatagcctgagctgtaccttggccccttttagccacagctggagcagctgggatgcagggcaccaagtctggagggtgcacacagcaggggggccctggacctggcccaggagaccatttttccctcctagacctctggtctgtgataagaggggctgctgcaaagctctctgacatgccctgtagacattttccctgttgtcttggtggttagcatttggctcctcattacttatgcaaatttctgcagccagtttgaatttttccttagaaaatgggtttttcttttctactgcatcatcagcctgcaaaattttcaaacttttatgctgtgctttctcttgaatactgtgacacttagaagcttcctcttccagatatactaaatcatctctctcaagttcaaagttccacagatctctagggcagggggaaaaatgcctccagtctctttgcatagcaagagtgacctttactgcagttcccaacaaatttctcatcttgatctgagactacctcagcctggacattgttgtccatattactatcagcattttggtcaaagtcattcagcaagcctctcagaagttccaaactttcccacattttcctatcctctcctgagccctccaaactgttttagcctctgcctgttacccagttcccaagtcacttccacattttcgggtatctttacagcagcagccaattctaccagtaccagtctactgtattagtctcttctcacactgctaataaagacataatcgagactgggtaatttataaaggaaagaggttcaactgactcacagttccacagggctgaggaggcctcagaaaacttacaatcacggtggaaggggaagcaaaaacatccttcttcacaagcagcagcaagtagtagtgccaagaaaaagggaaaaagccccttataaaaccatcagatcacatgagaactcactcacaatcatgagaacagcatggaggtaaccacctccatgattcagtgacttcctactaggtccctcccatgacacggggggattatgggaaccaaaactcaagatgagatttgagtgggaacacagccaaaccatatcatcatatatctggtaagagataatattgagaatattaaaatattctgaactcctacaaattaacaacaacaacaataaaacccttgaataataaataggcaaataaatggaatagacatttttccaaagatgttatacaaatggccaaaaagcatatgaaaagatactctacatcactaatcattagagaaataaaaatcaaaactataaagaaataccaccttaccccccactaagatgattactatgaaacaaaaagaaaataacaagtgttgacaaggatgtagagaaatcaaaaccctcatgcactgtcggtgggaatgtaaaatggtgcagctactagctactatcataaacagtatggcaatttctcaaacaatcaaaaattactatatgatccaacaattcaatttctgagtatgttcaaaacaattaaaatcagggtcttgaagagatttgcacacccatttttacagcagcattctttataataaccaaaaggggaaagcaacaaaagtgcccatggacagatgaatagatttaaaaaatatggtgtagacacacggtggaacattattcagccttaaaaagaaaggaaattctaacacatgctacaacatgaatggaccttgaggaggttatgctaagtgaaacaagttagtcacaaaaagacaaatgctgtttgattccacttacatgatgtacatagagtagtcaaattcatagagacagaaagtagaatagtggttaacagaggctggcaggatgggaaatggagacttgtttaatgaatatagagtttcagttttgtgaaatgaaaaagttctggagatttgtggcacaacagtgaatagacttaacactaccaaactgtacacttaaaaatgattaagatggtaagttttatattaggtgtatttttacctcaatttaaaaaagaaagattattggggagttatatccatgaaaggaaaggggaagaaagaggaattatcagactgtgatgcaggcttgacagtctctactaggccagtgggaactcaggagcaaaggttatctgccagagggggccgcagcggacggacatggctaggcctttgcatcacttccttgactttggccttgcatgcttattggctggggctgttctgaaatgagcaggacctcagcttgaacactgaggcagttgctgaaggagagaacaggtggaggccatctgacagtgacattcctcaaagctgggcagcacattcttccttgaaggggtctgtctgacacacctccgtatctgccacatgggaatagggtgagttttattttcctttagtttgtatttctgtgtattccacatttccaataatgaatgagtggctttttaaccacaaatgaaataaaagttattattataatatatagcaaccaacaatcttaactattgaacagttggttagttacttattaactgtctgtttcagaaagttatgtgcagaccccttccaagtaaacacattccatcccaataaatcaaggcgttattaatcctcccgtgcaattgaaagaaaatgattcttctgcagcatcagttgatatttgtcattttgaaatatacataggcagtggacatcaatttcagctattgccaatgttaattttatcctgtatctctaccagagtgtaaaagactggatccttccaacaatattagtcacagtgtataaaccttggaaagcattattttatcatcttttggaagaatggagttctcacagcaggcttaaagcagtagagacttccaaagggggtcatggtggaaaaaaggaagagagtcgactatcatcctccaataatgccggtaaaaaaacttgtcagatcctcacacgaaagggaccttctaagaacaagatgcaagtagaatcatcagagtgacggcttttcaaactttaaattatttatgggttatgtactcggatcctgggcaggctggtgtcaagagagcttcatccagaaaagaataaaaatttcctgattttactgatggaaagatgaactgagggagcaagaaaattatacagagaattttacagacccaaaggctgagagaaatgtagggctgctgggtttcctacatcaatctggaataactgcactgagatgttgggaattcatccatgcaaaattacttgagtagaaaaattattttctactacaaacccacaaaatagaggatcaataaactgccaggagatagaaaacactgagtaatcacgtgtatcaaactgaagagctgttgctgctgtatacttcggagactctgctgtatgtctaattaagcaactgaaatgatttttggactataacatgtactttaaaagtggaatttgaagggcaactctgtcttttctaggtttaacctgtgcaagtatgaatcttgagtcaccagtggtgagactcagcaaaatctctaggtaatgattcaactgggttaggacaaggctgaaccgatcacggattcgtttagcaaaacatgcagaatcgtcaagctctcttaaccttgttggggatttaggaggtatttttgtttttgtttgtttgttctcatcttgtttttgttttgcatgctaccacctgcagctgttagagcagtgaatagaaccaaaattggggagtttagcttctagcgcagggtgtgctggtggtagataagcaataaataaaatgaataagtaaatttgaatcagttgatatttagagtgcaattaggtaccatggataaaaatcatgctatgaaagatgtatagggaaaagggagggaggagaagggaaatttgaagtcagtagaagagggaaggccttgatgtgaaggggacatttgaacaaagacttgaaaaaggcaggagcatgcggtgtgagtatcttggaaatgattgctgcaggcagaggaaacagcaaatgcaaaggccctgcatcactcagagcaggagatcgatgacacaatcaaattggatattgtgaagagagtttttaaaagtgttaattataaacctgtgagcaggttatagggaaatgacaaggggcagtatagtatttaggagacgaagacagtggggtgctatcatcatcactaagcctgcctgagtggcaggaaagtagctattagaatttagagtaagagacagctgtgttgagagtctgcccaccaggagctgtgacccttaggccgaggatgtggcatctgcataaacactgcaggaaagaagcactggagtaaagacccactgaccccactcttgtcccttccttacatcttcatctgagctccccattggacgaaaccgacctggaagcagaggtccggggagagaattgagatgggtcatagagtttatccttccagggcataaaacaggcttgagaagggtggagagtgtctgtgcctggaagggcaaacaaaaggcatctggcacagctctaagctgagatcatggctgatgtgaagaggagtagcaaggctgtcactgtgattatagaggaaggattgaggaggggaatatcaggagatgagttcagacaaattgcagagtagagtttcatgggcattgtcaggcattgagaagtccttagctatcactgtgagtcaaatagagagctgtggaagagttctgtgtgaggcgatgatgtgagcagacatcacttaaaagtatctccctggctgctgagttaagaacagactgacgtggggcaagggtggaatcatgagaccaaggaggatgcttttgcctaatttgggcgagagagagtggtttgaacagatggatgcagtggaggttgtaagaatggagaggtttctgaatacattttaaaagtagagccaatcagatttgctgatagattgaattggagggaggtgtgtgagggaaagagaggagtcaaggaatcgaggatgactctgaattggaagcatggagttgccatggattgatttgagaacactgcggaaggagtgcagttattgaggaaaactcaaacattggttttggatatgttgagcttgagatgtctcttgggatgtgaggaataggcagttggctttatgagtcttgactttaaaagagagattatagtgaattcttataattttatgatgcctcggcatcaattttgagtgtaagttggaccttcatatgccaacaacagggctttgtcacctgtgacacagtttacagttctctgccttctcctagtctctcactgtcatcaatacagccacctcctggtaaccacctccctatgggagagctagatacaacctccttgactcaccacactattttcctatttatgaaacagggtggatctctttttcctctgtcttctcaaacatacactctttcaaaaccctctgtggcctaacctttctctggcgatacaagtcatgcttggtttaacccccaagcccagcatagacagtgtggctatgccacagtgatcacctctcagtcacagtgtacctccatggaactcatgcctgcttgctcaaacctatcaattagaaatccccttggtaaacctgcttggggaatgccctggacttcggtaaaggcattggctcacaggtccttttctctctctctcttgccgcccactcactggttgagtgtgtatgtcctggatgactacccccttcccattggccctgagaggcatgctgccctcttcattctgggatctgtaattaataaactgtttctgcatttcatgagttttgttgtgttgcatcctctgtgtctcacctaactaacacacttgaatctaacttctttcctagtcaggggtctcttagagagcagtgatcttagtaggaataaactgatataggtcagacaaaagccacaagggcatcttgcagtataaacaggtttcctgtgaaagagacacctggtagcaagtcagacactcaggcattaggtcatccactgggataaagaagtatcacgggtgtggtggctcatgcctgcaatcccagcacttttggaggccaaaacgagtggatcacctgatgtcaggagttcgacaccagcctggccaacatggcaaagccccatctctaccaaaaatacaaaaattagctgggtgtggtggcgggtgcctgtagtcccagctactcaggaggctgaggcaggagaatggcttgaacttgggaggttgaggttgcagtgagctgacatcacagcactgcactgcagcccaggcaactaagaccccgtcccaaaaaacaaaacaaaacaaatgaaacaacaacaacaacaacaacaacaaaggaagtatcaagtgaaaggcacattgtaaacatccacgacccccttccctggagccctgtgagggcagggctagaatttatagacacactccagagagagagagagagagagagagagagagagagagagagagagacctcaagagcaaatcagaggaaatcacaacaacgtcttcctgggagatacaaattttgtacatgtcagtgtatagatgatatttatcatttataatctttggatgagatgagacccctgagcgaaacaacgtcttcctgggagatacaaattttgtacatgtcagtgtatagatgatatttatcatttataatctttggatgagatgagacccctgagcgaaagagtttggaaaggaaatagaagaggatcaaggactaaagcctggagactccaactctaaggaggaatcaagaaagaaccactaagaaggagctgcccgtataggagggaggaaacattaaagagaagagaaggtggcttcctggaaacgacatggcaaaagtatttctaggagaagagagtgatcaacagtgacaactgctgctgatcggccaagtacaataaggactgaggcttatccattggatttggcagcatgaggtcatcagtgtccttgacacatccaaacttcatagattaatgggggcaaacctgattaaagcaggtttaatgagaatggtaatggaaagatatgcattggaaataattagtgtagatttcttttaagagcattttgctagaaaagtgagcagagaaatagggcagtaactggagagagaagtggagtcaagggattttctattttcttttttaacaggagctagaacatgttttaggaaactggaaatgatctagtagagaaaaaagactgagaattcaagagagagaaaaaagaattgctgcagtaatgtctttgaggaggccaaagggagatggatcctagtgttcaaatcaaggggctggccttagatagaagtaggtccattcattcatagcagtggactttaaactttcacattgaaatcatctagagaggtttaaaatttctttagcatgcatcagactcactcagaggacttattaaaatgcaaagtgggtgtggtgtctcacacctgtaatcctatcactttgggaggccaaggctggtggatcacttcagctcaggagttctagaccagcctgggcaacatggtggaatcttgtctctacaaaaagtgcaaaaattagccaggtgtggtggtgcatgcctgtagtcacagctactcgagatgtcaaggtaggagaatcacttgaactcaggaggcggaggttgcagtgagctgagatcacaccaccacactccaacctagatggcagagtgagaccctgtctcaaaaactaataaaacacaaagtgctgggactcacctccagagtttttgattcaataggtctgggtggatctgagaatttgcatttccaacatcccaagtgatgctgttgctgatggcctggagaccacactttatggatcatggaaatacggtaatagaaggaaaataatagtgtatggggccatgctggcaagtgagacaatgtagtggtggtgggaacttgagaaagtttccttctgattgtttaaatattctcagtaaagtttttttttttttttaaaggtagttaatggggagagagagagggtgggagggttgaagatttgagaagagaagagaggtatcttataatcatgtagtaaatgagaatgtgagtggactaggaaaatgtaacataatttttgggcccattggaagttggaagtcatgaattgacggtaagagcaaccagcacttttgtgcattttcctctagcagtatttagttgcagagatggaagtgtagtgacggtggagagatgaatttgaccagggttcaaatgctatgaagtgagacaagcaagggattgagagtgtttaccagggaggatttataatgactgaaatggaatttaggttttgatgaagaccaaaaggaagagtttagaacagtgagggacagtaaatggggttaagttaatagaatgaagtttttttagagccaaaagattgctgtatgttagataattgaatccttgaaactgaaatttaggagaagttgcttttatttatcatgtcaaggtccagtttgtgaccgtgggagtttgtggttgaggaagggttgagatcaagattatggacaagaggagtttaatgagccgagagtccagggactttgaaaaaatcatttatatgggtattgacgttactaagattcaagattagaagcagtttgtggagagtggcagtaagctggatgctaaggtttttgagaaacaaaggcttcaaagctggagctttcaggaaatatggaagaagaatggtctggaagtggcaatgagaagcacggagggaacttccgaatctcccatccagggtctggggattgtgggagaaaacaaccactgcttgagagggtttcaggggcatcacacccctagggagacccaggtttcacttagaggaagaaggccaataaagcccctaaggacacgtttaggtggttgggtgtgctagagatgtctgacctgaattccagagggcacaatataaatttcgggagtggaggatgacccagggactggggcagacacagggatacagagttgtggggactagagtagataactggtcacctgggagttggaatttcttagaacaactgatttaagtagtgggaagaaccataatttgatgaatcctggtggcctcacaaaagagtgatgttgagtctgaatgttgagaggtaatgagaaggggggcttgggacaccccctcagtacgtctgagtgagatgtagaggctaggaaagggtgatcttacgctgaagatatgagattctctcaagtctcctgaagatagaatcttggatatatggagaagggatgtttaatctggggtgcatagcataaattattttaattagaggaaataatcttgtaagtgttgccagtatcagagaagagaaactcaattacatggagaatggatacggtatcttggagaaggcttgctctttattctggtatataaaacataaagaagatgaaatacaaatgtagaggaattatcattgtctacctatctcttaattagttaattcagtttcattcttctggcttttacagaatgtcttttaaaggtgtttcttgtccaaattgcactacactttgtgaacatgaccattgagatttcttggcagaaccttgatctgtagataacctcagatattttatttaaatgttattttatttatttctataagccttaatttctctggatttggtagcataaaattgaatccaactaatatttattgtttctggtgtgggcagtaattagttatgtcctctgggagaggaagaagaactctaagatgcttagtagcttaactgaaactaaattttgctttgcatttcttaatattttttcttgatgaacatttccagggagtatcaaaagtacatcctgaggtcaaattttttatggccattattaaaattaaaatttataatttaagaaaaagcctgtacatttggaaagccccacctatgcacattacattggttatagggcagaactaattttgtagctgtaactagaaaatatagaatatataaacatctttattttccatctaccgccacataactctcctggaaaaatggttttatacttactacctacattaccatgatctgctactttctgttgcacctactctatgtgggtactgtcccaagctatactctacatggagatcactagtgccctaggttgtccatttttagtttctatctcaatctccacatgaacactgtttagtcctcatcttgtcctgtcactatgtttgagtctgttgataacttttaccatgttgaaatattttctcctgttgcattcttgcaccccacattccccaggttttcctgcttctccactgccatttgttattggaccattttgctgctacttctcctctttcagatccataaaaatgttgttaaagacccaggcctcagtctttggtcctcctgtcttctaatccacactcatagtttgagtgctctcatccagtcctgtggctctacaaattattacggtggtgtttcccaaatttttatttctagtctcaagctctccctgaactctagactcacatatttaactatttgacatctccattgagatgcctagtgggcatctcaaacttactatgtttctaaactaaatgctggtttcttcttctcttcaattttccatattttaataaatgaaaccaccacttatcagagtgctcaggctcaaccttgatggtatttttcttttatacccaagacacattcataaatcctttggctctgcttctgaaatacacccaaactccaaccactttcaagcagtgcctcaacattatcacccttgccaaaaccatcgccttgactgccaccaaaagccttatgatttatcttctactcttgttcccctagatctaatttacatacagaaaacaaagtgaccttttagatatgtcaatcagattatgtctctttttatcttagaacactacagaagactttccatcccattaactataaaatacaaagacaagaacttacatttccatcttgttttctataatgttaccacttttccatgcaccccagacacactggtctcctctctgttccttgaacatactgagtatgtttttacctgggtctttgcccttgctatgccctttggctgtaatgctttctcccaacatatacacaggcttccttcataattccattcaggtgtctgtgcacatgtcgtctacttaggacttcctggaccatcttatttagatagcaaatccccatccttcattacttgctacctttctaccgtgctttctcattcttcttccctggcttgcattatactttctatttatctgtttttttttgtttctcccaatggaatgtaagcttcctggtatcagggtctttattttatttctctgctgtgtctgggacacctagaccacctagaacccacgacaaattaagttattgtcagtgaggtgagtcaaagttgcatctacttccagaaagagttttgatagtggtagtggtaagtatttggcagttggcctgaagttgttattttgttctaagaattgttgcagactaaatgaatatttctgataaggaaatggaaaggaaaatttgaatactcttatattttcatgttttcaatcttatggtggtgagtcaggcttgtaacaaatgctcaacacattttatttaataaatgaattaaaagaatgaatacaagtatgcatatatatatatgatatacgctgagatcacatcacaaattattatatctccagacaatttctttttttgcagggactatgccatagtgtcagaagtcctgttttatgaggcaaataaaatacatttcactttgcattatttgactgttacagagacataacattctatctctatggcttcactctgtttaaaagcaagaaactttttataactgaaagaaaaaaaacaagtgcactttaattaaccaaagacataacctcttacaaatatactaaaatgtaatttgagaaccatttaagtcaaaaatcatctgcatttttcaaactttcacacaccaccacatgacaggaattttttgaaaaactacttatccataataaagattgctccaaatataagcaatacaatttattcaattttacagtattgcattttttcattctcatattttcatcctactaagaaattagggtttgacatttttggacgtgaaactctatcctccttttctgtggtgattatgttaagttcttctccctctctgcatttcacagagcatacaggagtgtggtcagagaaggggcttggaaagagcatatgtcaagttgtcagaaaatgtggttttcagtttccattttggcatcttagccatgtgacctcgagacaggcacctaacctctgtatgtctctaacaagagggtatcaacagttggtctttgagatgccttttgccgtgcaagtccctggatttatggaggtctcctccgttcattcgagggtgggagttcctcttcaacattgcactgatcaaatcaaagtaaagtgatttaaaatcatgtagaatcctagacttgacttctcttttcattacctcattatattacttaactgtattcctatccttgcattaaaaaaattagttcttatcaggaaatcactcaatttatgtaagatataagtagcattcaacaagagttggttaatttaataaatgaagatgaatggaagaaatgatgtcgtttgtctgaatttaatatgctggacttaatatagttaagaagagtgtaggacaaaacaggttttattcttatagcatgctattgtagagagagagcattttaagctctatttgataataatatgcatttacatgataaaatttttattcaaaatcaattttattgaagtataatttatgtaaaatataatgcacacatttgaagtgtacagttctatgagttgtgacaaatgcgtaaccatatgttatgcgttgaattgtgtcccctccaaaaaaatgatgtattgaattcctaacccccagtacctcagaatgtaaccttacttgaagataagttctttaccgagataatcaagttaaaatgaggccattagggtgggccctgatcccatatgactgatgtctttctgaaaaggggaaatttggagatggaaacttgcactcagggataacaccatgtaaagactggacttatgcttccataagccaagcaactactggaagctaggagaaaggcctggattggattcttttttagcaccgtcagagggagcatggctctgccaacacctcagtctcaggcttttggcctctagaactatgacacaatacattcctactgtttaagccacttggtttgtggtactttgctatggcagcactaggaaatggacataccatgtaactaccactctctaaataagatataaaatatttccatcacccagaaagcccatctccaccccctactccaggcaattactgatctgatttctatcactatagattagttctgactgtcgtaaaattttatatggataggatcttgcagtgtgttctcttttgtgcctggtttccttcattcagcatactaggttttgaaatttatccatgttgttgagtgtgtcgatagttcattcatttttattgtcaaaatagtattctctactttccccaagttgttgcagctcaattgattctaagtgggtgggtctatttctggattgtctatgctgttccccaactattttgaaacactattttattctgttattctaaaaataacatgagaataaataaatagtatgctatccaaataaattataactgaaactgaactccaatcctaaaagagatggtttgacccagcaagtcagtaaatcacaacaaattaatgtcagcacatcaaggaggccatttgaaggtatcgttttgcctatttaatgagatctaaatatttgaaaatgttgacatatgctccagttctgtgaagctccttcgttttgttttatcttctctcattcctgtgctttaccaaaatccctcatgcccaggtgctgaaagtgacacattaggtatttattatacaatgtggagcttatccttagctttcctcccacttccatgcagataatgactcttttttttttttgagacggagtcttgcactgttgcccaggctggagtgcaggggcgcgatcttggctcattgcaagctccgcctcccgggttcacgccattctcctgcctcagcctccccagtagctgggactacaggcgcccgccatcatggccggctaattttttgtacttttttagtagagacggggtttcactgtgttagccaggatggtctcgatctcctgacctcgtgatccacccacctcagcctcccaaagtgctgggattacaggcgtgagccaccgcgcccggccaataatgactcttatacccaaaagttgctgtaaaaatttttttaacaggtggcacaagaccttggcattacttaaatcattaattttatgttctctaacatactgtgctcattataatcatgtaattctaaaacttattccctgtatatatgtacacgtgtgactttttctgtgctctttcaaatcatttgggatgtttttgccctgttgtctagagggccttacatggatttacatttcttctataaagaattcataacagtcccagttgacagtgactattcacttggtctactgcaccaagcactgtaaagaacacataatgggcccactctgaatgtttgttgaaagagtaaaagaaatcagcaaccacagcagtgtgctataatttagatttggtaatgtttttcttcctaactctaagttctgcaagaacaatggttttattatctacagcagaaagaccttttacatgaaaagctaatctttaggatgcaaaagataggatcattctaatttttttttttttttttgagatggagtcttgctctgtcacccaggctggagtgcagtggcgtaatcttggctcacctctgcctcccaggttcaagtaattctactgcctcagcctcccgagtagctgggattacagccatgcgccatcactcccagctaatttttgtatttttagtagagacagagttccaccaagtcagccaggctggtctcgaactcctgacctcaagtgatccgcctgcctcagtctcctgaagtgttgggattacaggcatgagccacggcgcccggccaatgtttttttaatgggcttccatttaagaaaatctcacctggcgaaagttacaaatagtccactctgattcaagaggaggatgcatggtgaaaagtgttaagatgttgtctcctgtctcctggaggtgtgatctagggtcagtgtctgtagatgtggtgttagtctgtaaacaacagaggacagttagagggctttaaacagagacagctgattggagttggaagctggactggatgaatgcaggactgaaagaaggaaccagttaaaagaatattgtaagagttttgcgtatttttatctagaagagggaattgagaataaaagagagagaggccagaatgaaaatatatctaaagataagtttagtgagcagttggttgtaggggatgggggagagaggattccaagacaatttagaatttcaaatcatattcttgctagtattcccagttcttctccatctcactttcctctgtcccctttccttttcgtaagtgtaaagaaagccataaggccagaacagtgacttcaggatttgtctccattagaaggagacttcgacaaataatagacactgtaactgtattatgcagacatttaaaataaggtatatttataatgtttcagtgtagaatcaagtgagtttaaattctatacacaaggtcaagtagacttactggtggaaaatcaggtaaatatcacaattttggaggaaggataaagtaaaatgtacagtgtgagagggatatgaagaggaacaaagggaaaaggctgttgtaatgtcttagtggattgagccagttatgctaatcttctgctgatgattagtatgcagacaatatttaacaattgctcttaataagcagcatttctttctttttaaatttttattatttatttatttattttttgtgagatggagtctcgctctgctgcccaggctggagtgctacggagtgatctcagctcactgcaacctctgccttccgggttcaagcaattctcctgcctcagcctcctgagtagctgggattacaggcatgctcaaccacgtccggctaatttttgtatttttagtagagatggggtttcaccatgttggccaggtttgtctcgatctcctgacctagttagtggtccactcaccttggcctcccaaatgctgggattacaggcgtgagccaccacacccagccaataagcagcatttctgatgagcttgatggtccaaatattttttggcttctctgtactttgtcatattttactaggattgaaaaagatgttcaatctggaagtagcatatttctgtaggtttaggtagagaaataaggaaaaaatgaaattaaataaaaaagctttctcctattatccttatgtagtcataatggtagtgtacatttctagcactttatactcctcacattttacttttttattttatatttgtgataagactgaaaggcaacattattaccctcatttgcagataaaaaaattaagcctgaacatttacataatgtctaagattttataatttatgagtggcttatctgtatcttgacttttggttttttaactctttgttcaatcttattccagtgtgtgtgtgtgtgtgtgtatgtgtttgtgtttcggggagggcgaggtggtggggatcattggaggatttatagaaatagcatcctttgctaagccagttgcctctcctgtactccatcttacacatctggaatttaatggcagcagtgagcattattattgaaagtgagtttagccaaatttgataaccctcagaccctgcagaaatttttagtaggttcctccattgttccttattggacaagtcttggatgtgtatgagtttactacttaaatgtctggttggtctctggggtaatttcacatacctcattcttctggcacttggcagtgaaatgctggaacaagaacttagcaatgtgtgccttttgtcagaatttttaagaatgaggtcataatggaaaagcaaacccactagttcccctttccatggtttcctgcctcagcactggtgcatcaacttcatgacacctgtttaggtcccagtgtgactgtgtcttgtccagacagagctcagcttttgccctcactcagcagactgccaccctgacatggatggttccctttgtctctcccttctgctctgctgtcctgttccacaggaggtgccaatcctgtctcttcagcagtttctagctccagcagctcttagctgtttgccccatgactgctctcctctttgttgctgctacttaatttgcctctcttcctgtcctctgttctactccaaacttcccaatctgcatgacattcgctatccagcatgtggtgagcatgggtctttatgctctttttaatttaagaattgcccaattttggaaacacttgaatcctatcctctgatactgcccttggggaaacagccactggacaatacttgctatcagacttttcctctcctccccacatttgactatcccttttgtgaggtccatgtccatgtcttggcttagaatgaggatcttactttcctaaaggctgcagcatggctacttttaaccttctgccaggaaaggaggatcttagctcctcatagagcttgtgtttattattcccggtgcttggcactaaggattgcagagctccaatagaaagtgtgaattcaattcaaacaatattcttggtttatctattgactgacagctgtcaggagatccaatccttaccccatagcctctgaagacatcatgtgaggctgaagatcctggtttattctgtgagtgcttttttcgtgttaaaattatatagtccatgtatgttaaaaaagattgcgtgaaattctactttggtcattaagtatttgaagatagtcagaagtgttagcaatctcattctctttctgacttaatcctttctctagccacactgtggcacagctgataccaatgtgaggagagaaaccgagctactgcattagcaccacttgttccacaacaggtttcaataataaatcaaagctaagggaatcgaagatgagaaatgccatgtttaggatgatagggtcatatcccaatgttagtgagcatggccatagtttgggctggaacttcatacctcgtgctggaacctccaataacaagctagtgggagaattgggaagccaagattgagaggaaccagggatggtggcgagggtggctgttagcacaaattatggtgctcagaggtatttggccatctcagcatgatctaggctggcctagattccccgtcaggagtgggtggagggtttgcaacagggagagagagcccagcctgagggatgtttcatagaagttgagagagtagtagaactcactatcaggtgggaagctcaactggttcaaagggaattttgaccctcatcaaggaatacaaacataggttacaacccccatctgagaataggggaaatgtttgtcaagttgtcaaggccattgttaagaggtcagagggttatagcaggatttcaggcccagtataggaataaattctcagtgaggaagcagctggccaaggctctccaggcccattagaaggcagctgttacagttccttatagaaagtctatcttggttgaaattgaatcagtaactgggtggaactgaattttttcattgaaggaactaataactgcaggagaaggagatatgaaaggagtgactggtataatattgtggtgggaagggtgatcagctcccttggtttgagtggactgagggggttcctgggacaaaggacttagaattttaaaactgggacagtcctgggcaaaccacaatatgatggtcagcctgtgaggaaaggtatttgatagtcttggtcaaatggctgggcaagtgttgcttaaggttaaagaagaaaaacaaacaaaaactgttcatgttggtaaaaatgtgaaatgtagagttggtagtaatctgagtgggaaatgaatattcacttcctactgtacagatacatattcaattatagaatcttaaaatttctgaattgagaagaaagttggatattatttaatctctcattgtgtgaatgataaggttgagagtcagggagattcaataaatactgaagttggattagctaattacaggcatacattttctgactccaaattctttgcttgccctcatggatttttttgtgtaacacctgaagattcttcctcattcctcttaccacgcataggctagtttttttttttttttttttttttttttttatactttaagttctaaggtacatgtgcacaacgtgcaggtttgttacatatgtatacatgtgccatgttggtatgctgcacccattaactggtcatttacattaggtatttctcttaatgctatccctccccccacctcatgacaggccctggtgtgtgatattccctgccctgtgtccaagtgttctcattgttcaattcccacctatgagtgggaatatctggtgtttggttttctgaccttgcgatagtttgctcagaatgatggtttccagcttcatccatgtcctacaaaggatattaactcatccttttttatggctgcatagtatacatggtgtatatgtgccacattttcttaatccgatctatcattgatggacatttgggttggttccaagtctttgctattgtgaatagtgcctcaataaacatacaagtggatgtgtctttatagtagcataatttataatctttggatatatacccagtaatgggatcgctgggtcaaatggtatttctagttctagatccttgaggaatcaccacagtgtcttccacaatggttgaactagtttacactcacaccaacagtgtaaaagtgttcctatttatatattattagttcttttctcagagtcagtaagccttcttcaaagattatagtaaaatctacaatagaactataaggatagcaaatggtaatgcttctacaactattactgttactattaccagtaataacattgtcaaaatcttgccaatgtaccataatgtagcagtctctcgttgtgaggtatcacttggagttctttgtctcaaaaccaagagaattaaggagcgtggacacaaagggtgaggctgaggtgaatgttttttatttttattttttgagacagagtcgcactctgtcacccgggctggagtgcagtggtgtgatctcagctcactgcaacctctgccttccgggttcaagtgattctcctgcctcagcctcccaagtagctgggactatgggactaaaggcatgtgtcaccatgccgggctaattttttttttttttttgtatttttagtagagactggttttcaccatgttagccaggatggtcttgatctcctgaccttgtgatctgcctgcctcggcctccaaaagtgctgggattccaggcatgagcactgtgcccagccaaaagtttaataattgtaaaaagaaagctctctgctatggagaggggagctggaagacggttgccatttttacagttgaatacaaaggcttttataagaaaccgatgagggctgagcaacttatttgcataaggcacaaatttctggtagctccaccccatcctcctagtgcatgtgtgtgtccttagcttgggttactccatattgctttgtatccctcacagcacatgtgttaagagacagaattttccattgcaggcatgtctgggcaagccacctgggtagcttttcttatctgtgcagctgtgggcatgtcttaggcaaggccccctgtgcaaattcccttatctgtgccagaagtctgttattttgttttaaagagttcaaccgaggacccaccctaactgcctgcctgatcatttttctcctttctcctctctcagcatcactgccattaccaccattactgtagtatgaggggaatatcagaaaatgtttgtttcatccccatttctgaggcgggttgaaataaagaacaccatgaattcaaggagtctagcagtacttcttggctattggatctctcttcatcatttctactgtaaatctttgagatggatacttagctctggagtcagtgaatttactctttcctacatgttgtcattttgattactggctgggctataaatcatactcagaccatgcatccctgaagtaggaaaagaagtaaaatactgcatagtgaccaaacttcaaccccaaaaactgttacaagagaattccatatctacagagtgagtaaaaatgacaaataagtaagtctttaagcttcaaagtttaaaggaacagatcaatttcaagtggagggctagcttgtcatttctcattctgtgtattgtcaggtccatgatgtctagcatacccagagtagctccttggggattgtctgctgctgagagtcacaaatagaagaaggatgtttcgaacaagtccatgaataagatgtattcatgctttgaaggtgcttctggagagtactagaaaaaaaaaaccaatccagattcttcactctttcaaattaatgctagaagaccatccctgaaatagctccttggtatgtcatctggccccttcaagattggtttgagaataatcttgatccggactacaaattgaaaatataaattcatattttggctcttgaacttatacaattaccaagtggcagcttacataattaaatgttatcagcaatgattttgggaacgggctgatttttttgcccaacacaaggccttgactattttggaattgaataaatataattttttggaaaaaactcctattgttcccaggagagcaatggatttttggaatggtgaagaagggtgagagttgttaccaggggccagaaactacatatctgagactaaaagtatattctcacctgctagaatcaggtcataggaaggtaaattaacatttcaaaattcaatggtttatttctaggattccagggaatatttttgtcaaccacccctgaagcttactttagtatggcagatcttcaggtagtgctaaaatgtccctctacgagcagtagataatccctatgaggaattttctcttttttaatttggataatgtcacctggatcatgctcttatataagcaccaaatcaatgttatataagtggtaacaaccaagagtttcaagcttcaataaatataaggtttattaaatgcaaactaagtgaagttcattgcttttgctacttaataattgcttagcctaaaatagtcaccattttttttttctggtataaaagacctttcacatacttgctgaacacaattaaaaattagcttcatgaaaaactcaaattgagatggttaataaatccattattgggtactgggagattgctttttcagatggagttaagagtttttctctatgatatattgttttcaataaagaatcagctcctacactaactattccaatatccattatgaatgaaaacataataaaacatatcttgtcagattaagaagctcctgaatcaaccttcggaagacaaagtagggcttctgcataaactggttatattacatagggtaatgccagcaggcaatcttaattatgctttcttctagcacgtgatgatatatcctgcaaaatattgtgggcaaacacttgtgagaggaaccaacagtgcaatttttagggtaggtgcattgcatagtggttctttgcttttctgttaggcttaaaaacacctagttttgtcattttcttcaatttaatccaactcatattagattttgtaattttatcaagactaaattcctatctaatcagtaaaacatagaaagtaaaaaaaaaaaaaaaacgtatcctgtagtttggtcttgtgcaaataaaccaccttctttttgtgggcacaatggaagttgaaaatctttatgtattttcttgtactgtcacaccatgtgagtcaggcagatcaaatccaccttctagtctcagttttcccatgtgtaaaatggaaaaaatgcagttaatactacttttagaaggatgctgcaaaaaaaagcaataaaattctgtaatgtaatataaaatattacagccatgttttaagtacaaaaagattcttgaaagttttcattgtaagtctagattatgtgagtagaaaattaaattcactaagtgaactggttatttgaaatttcattgattagtcttcctataaaaaagactttcatatctcatgcttgcttaaaacatagcagagaccatcagaaaatgaagccattgtatttagaatagaattaatgtgaggatacagtttccacatttttcccttcaagttgttctgcatcttgaatgaacacagttctccaattaaacatgaggctggagattgagaagagactttccccttaagttagtaagtttccagttcttagtcaagtccaagctctgcacttggagttaatcattttgattggtgacctagtcttggcagaggtgtgttttgtcttttaccacagatagctcaactatcctgactcacagagagcttactagaatacatcatgttataccctgtagaattctagaatactgtagtattcataatcctggtgcgcttttatcaccatgttttcaggaaaaattttagactgtgattaaatgaacatgctaacccaaaacaaaagcaaaacaaaacccccactgtggcatatacatgtgagtgaggggaatgggaatcgacccttgtttattattgactgttgtacctaaaactatacgctaattcctatgagtgaacagaatatggcattggtatctcatgtagttacaaagagttgatttgattcaaacttgttgataggcagaattattgttgtggatttggtaattagacataaatgggaagtcctaaagaccatgtttacttaaatcacaatgtgtatgctcactctatggtgaatgcagaagaggacattagcaggtgtggggggccgaatttaaaatggtcctgatgacctttgctgctggcctcactcccatgattgtggtactttgtgtggaaaaatggagattatcagggttggcctaatctaatcatgggtcattgaaaaccagagatttctctggccagttgcaaaaggaaatataagagggatgtgaagtgtaagaaggattcaatatactgtctttgaagatggagggggccaggtgcagagaccagagagcaacctctaagagctgagagtgatctctgacagccagcaaggaaatgagacctccaccctgtggctgccatagaactggattccttcaaccaccggaacaggtggatactccttcagagcctccaaataagagtcaagcatggtcaacatcttgatttcagccttgtgatatctgaagcagagaacctaactgagcccacctggacttctgatctattgttctgtgagctaataagtggattatagtggtaagctgttaaatttgtgataatttgttacacaacataaaaactaatacaatgggagtagatccaattctttaaatgggcaatactgtgttgaacaaacgacttgacagaaaactaggactttaagaaaattttagaaagtcatcatatttcagctttatgtctcctagaaaaaaaatcaattattggaatttccagtctggactgaatagaggcttctgaaagttttgtgtcattgcttcaataacagctcagcaggactgactttgattcctgttcatggaatatacacgtggaagaatgaaaaatctagcaagttttggtggcccagttcttcaaattttcctattcagtcatctttagagactgacatatgctcttcagctacctctttgcttgtaggggattgtaacaactgctcttataaatttcctgtctgtaagttgctgaaattccacaaaagggaaaaagagataagctcaaaataaaaaataattccaggcaatacaaatcttgccaatagctgactaattgtgagttttgtagccaaaattcagtatggcactagaagcagatggggctattttaaaaagaggcctaccaaaatcaaggaattcttcctctgaagtgaccacagaaatcttcctggaatgttcttctagaccaagccttctgtgtaacatttcacagaagagcaaaatgcctttgtctgttagtttcgtagtctgatgtatggcacacacttttccaccacttttgagctataatcagtttgagggcaccagaaatagcttctaaccaacagtcttatattccaacatttttgtcatatactgtctaaaatgtaaccagataacatgatgattgctttctgaaatactaatactatttcctatataaaaggcatcttttatgggcagataatctatgacaagcttacattttttaggtaatttctcaaaatgacaaccctgctatatctgttttctaaaaatcaaattgtatgactggaatcagcttcaatatttagttcttatcattaagatgttataacatcaatgaaagataattgcatttctttttaatttttactttaattttcaaataggcaatatattcacatggtttaaaatttaaaagtcataaaagagtattcatggaaaattctctcttcaaccttatcttccagccaccgaggctcattttctggaaagcacagtgccacttattccttaggtgtccttccagccttagtctatgctacttatacagaaatctacatgtccatatagatagatgtactctggctgatggcagaaggaaatgtaagagggatgtgaagtgtaagaaagattcaatgtgctgtctttgaagacggagggggccacatgcagggaccagagagcaactcctaattgctgagagtgatcactggctgacagccagcaaggaaatgagacttccacattgtggccgccatagaactggattccttcaaccactggagcaaacagattctccttcaaagcctccaaataagagtcaagcacggtcagcatcttgatttcaaccttgtgtgatctgaaggggccccactgataagctttgtggaatgtgtcttagagttgcctgttttgccatgtggtgttaactccctcatgcctccagtgctgcacacgtatcagaatggctgggcagtttccacaggtctaccaggcagtagcagcggggaagccctagagcaggattgatagctgagtggtgcatctgaggaaaggtgctgtgaggctacacctgtgataataaggtagttgttgagtgacagttgcattaaaagacttttagccaaaagaacacgagaaaaggcacaagagacattcaacacatggaccattttggtatgagtatgcatagcaccatgagcgttaaagagggggtaggaaactgttactgatgctgaaattctagcacagattcaaattttcatacatttctgattctagaaagcgactcattttgaaaatatttactccatggactgacatttcttagtagttgctagtaggatttttttttattgtcgtaaaatatgcataacaaaaaatgtaccattttaatcgtttttaagtatgtgaattcagtagtattaagtctattcacattgttgtgcaaattaacgggctttggttggagaaaattgtggtagaaattttcaaattttggtcatgttgaaagttgctggtttatacttttttttttacttatgtcctgatatatcaaaaaatgtatgactgatttctttttgtaaacttgccttctgctgatgccttgtcatgaaaactagtgatgattattacatctggaattctacacctgtggaaatggctaaaaaattctaggagcaaacataatttaaaatggccatttttttaactcattattttgagacgtgccaatttgtgaagtatctggacatgcattgttggtattgtgaataacttggacaaaaccaaattgtgcaaaagtctttctcctaagcacgaagaatgttgggttgatccacaacggagttagccttggataagctcgtcacaaagtactgtccaacttcagattgtaccactgacaaattgatgacaattaataagaataggatgggtcttttgacataatccttagaaaaaaatatatctttggaccttttactcaggtgtctgctcatgcagacaccgtttttctttttaaaattcactattccttaaaatacaccctgaaaaaatacctagtttccaatagctatttctaatgaatactaaatactagaatactgaattctaggacattaaaacatttcctctcaagaagcatttgagccttcctctttttagtatagatggaagcttctctctaatggtgccacattgcacatttgcaaacctatgtttcagcaatgtcacatctgtgattgttggtacacacaccacacacacacacacattcaaatcgctgaagtggattcaaagaaccaatggcctttaggtcaaggtttctaaagcatcttgtcccaggaattttaagcatcttgtctcaggaattttacatgtgaaaaaatttactcatctcacacgttcatgttagcagtctaatcttctaagacctctgcaggaaataacttactactatgttttgtgaacgtgaagactttctgaaagaatccatgcatggcatttttgactttgcaaatagaacataattcttcaatggcatgtctgaactaatctgaggatgttagcctgaggtttcctgtgttttatcaagagcaaaaagaatatagttcacattatgacaagcatagatattagcagtgtccaagttatttttgtgttgtgtcctcttggattagaatatttattctggtcattgaaatatcaataaattcagtcaagaaaaataattagaagaatttattgtaactgtatatataatgcttaaggcagtgtttgtcagcttgaccctattgacattttgggccagattattttttattgtgggagctgtcggatctttagcaggattctcatgtctaccggctagacgctgatattttctccccaagttgagacaaccagaaatgccccctggacatcgccaaacatcctttggaaagcaaaacacacacattttagaatcactagcttaaaggaatatacactgagaaacattgacttaaggcatgctttctagtctcagtatcagctgcaaaaatcgatgacgtaccctgggaatgaggggctgtacccctgttgaaatatgagaataatttcttaccatttaccagttaggtgctatactcagtcctccagattcttctcctactctaccctggctcctccccagggaccattttccacctcccaactatgcagaaactccaggactaagtctgacgtggcaaggggcctccagagtctgttaaactttctattacattttatcgtcttactctgtattaattttattatttatattaactcattttactatcaccttttcagacaagctagaagaacctgtatttattgtgcctctctattcacagtggagtccttgagcagaaagtcagattactcccttttagtttgttgtctttaatagacaaatgagagttgtttccctgttccacacatcatccctcttctaaaatgactgagcattccttaccactgaacacatgttgaaacatatctggcttgcgtttcctttttagaagggcttgttgtgagaatcaatggaaaagtacccagagagaaattgctacacaaacttacaatgtaaaaatagctccagcggagaggataacaaaagctttgtcaaattgcacataatagagtcaatgataggcagacggtgcttggaactggtcctcctgatacttcagtcgttcattggcaggctgctcatgctccttcacagatttagagatactgaggaatttactgcacagtaccgtagatcacagcctaaatccttatttgtggggttatgagcatttaaatattttcttgtgggttccgtggatttcacagaattctgttttgtttcaatctgaaaaaaatcctcctctgcttatgcctgtcattaagaattaccaattttctgaaactcccccaatcaagatttccccttaaaatacgtgaaaataaatattttatattaatttacctagagtaaattaatgtcttttaaataactattgatttctgattataaaatttaatggactgtttattcagaaagcaataaaaatttcaaaacacacataatagtaccctttcatccaacaacccagagataaaagtattctggattttatatatagatggaattgctgttaaacgcaaaatgggagcacgctataaatcctctttttttctacttaatataagtggacataaagtagttttgcgtgattcacttgtggcagccgtatcgtatttcactgaatgcatgatcattatgagttgatccttatggatgcatgattatgttgattttgtcttatgtcatatttgacatagccgttatgattctcatgcacacatctttgcatatttgtaccattatttcttgtagacaattttctcaaagtgggagcatggaattaaaagattatgcacatcttgcaatttggtgtatgttaccaagctgctctccaggaagagccgcccaatttacattctactatggcctgagtgcacctgatcctcatgtcttcactagacacctatattttaaaatagattttcaatatattaagaaggctgtcaaaagttttgaggtcttgaattgatttagtttgattgtagaaatttgtgattgtgttttctgaagcaatgatcataaaattaaatgtttttccagtagaaattggtttaacccattatagaaagttgtcagagagtctggataaagatgagagagtgaattatttgtctagttattgacaaataagacggtatcaatatgtcttatgagaatagcatcagcactttaactgaactgactttggtataagtttctcccatagaaatttgaataaagagtggggatggcgtttaatgtattgcattattttttatcacattcagcaacaaagaagaaccttagcctggctttgccatgtttcttctgatggagttatttttgaatcctttttctccatgtactttttagatgccagagcccaagtgaagcacagtttggtcctgagtttgatgtgagatggcatccaaaaactaggctgatagctttcatttaagatatagtgactccagccggcatctggccttctcctctggtggagtgagatccagcctaggctaaatgacacactagacttttaacgtttttctgtccaaggaagctttttctgagtaaattgtagcaaaagacatatcaacacctataactatttcctttggaagcatctaccccttgtgattctctctccttctactcccttccatgactctcctgagttcaaagaataaggccaatttgcttttagagctagccttatgagtgaactgcctgtaacattttgggaggaggtggtaaaggagtaagaaaccaacatgtcctgcatacttactatctagcactacacagaacttttcctttcatcatcataacaagagtatgagtgtattagtcagagttcttcagaaaatatatccaatagggtatatatgtgtgtgtgtgtgtgtgtgtgtgtgtgtgtgtatgtgtgtgtttgtgtgtatagagagagagactcatttttaaagaattagcttatgtgaacttgtgggttggcaagtccctattctgtaaggcaggccagtagtctgaaaactcaggcagagtttctatgttggagtcttgaagcagaattgcttcttcctcaggaatcctcattctttcttctttagaccttcaactgattggatgaggcccaccaacactatggaacataatctttatttaaagtcaactgattgtaaatgttaatcacatccacaagtaccttcacagcaacatcaaggctagtgtttgaccaaacagctgggcaccatagtcttgccgagttgacacgtggagtcagccatcacagatagctcttgaaagcacaatcaaagcaccagatcatactaagtggcttacaatttgcaagtgaggaaattgggctcaaagaaattatgtaacttcaacaaggtcttgtaagtggttgagctgagattcaaatccaattctgactaacttcaaagtccacatgtggccactgcacgcacacacacacacacacacacacacacacacactaacatctcatatcctttctagacaaatccctggaaaaatttatgtcgtagaagaggaaaactaaccaagaccatctttcattatcattggtattgaaagcggttatgcaccacagggttgggggaaattaagtcagaaaaaaggcagctgtcacagataaaccaaaacctcaaaattttgtttgagctatatcttttaaaaaaaattccactgtttttagacaaataaaaattgtttagggatcggtagttgagactgaatcacatggagagagcttaagagaaaaattattaaccatatcagtttgtttagctactccaaatgtatacttggaagcagtagtccacatccttctcaagcatgttagagctttataagctccattttccttcccttctccttttttagggaaattagaatgttttgtttttcattggctgtatcttaggaaataggatggtttagtaatttcaatattgggttcaattaattttcattctgtatgtattgaagatcttgtgtatttttttatgtcactccgcaatataaaatgggaaattttaggcaggatcaaaatagcattacttccttagaatataatccttgaacccctaactcattctattttggctcagagttagaaagcaacattgttatttcagaaaaagaagcttgattataaagatagcagttttctgaaaaatgtccatgtttatcttgttttactttgactcgtcttacaggagtagcttttagagaaagctaaaaaatgtcatgaactattgactcaaggaaaacactaatcttataatgaaagtattgctatttttagatttgaggctctcattgattgttatatgagggtaagagattaaaatctagtaactgacatggacatttgattgatttgtaagtttaattttgtaattgactaatttgggaatgagcaatgattttacattcttaaatataaaatggattctctatattttgataccatatccacatccatctcctattatgaatgcttaaataagtatcagacacagagctaattactggtcatgggaaatgtagagataattgaatattcatggtgatagactaaacatttctaactttagacgcatacagactccttaaattcatttcaaaggggaagaaccacatgcaggacagttgtccaggtggccttggactgacccagttctccccaccttctcactggtagttcctttttttctattaaaatttttttttgacactcaaacagacttgcattaaagttgttcttaataataactgtaaaatgtgctgggactgtaaaatcctgagatagggagggactggctgaaatggccttggttctattccagtcctccactagaagcagcatgtcttccaaagcttaagcccagtaattcacctgaccctcgggtataaactcagggcagcctgctgttcagggtccctcagctgccgtgcaagtggagagtcacacgacacggtcaagactcaatttgtcccaagcagctttcctgagactcggggaactggcttataatgaatcctaggcttttgctctcctttgctgcctgtctgtaagtaataaatctgcttcatgtgacttgttctgtatgagtgtgttccatctcactggactcagagaaaatggtaagctgtgtacagtgagcctgcttcacaaagaaaaataatatttaccatttttcctttagctttgctcaaagttactttcaaaagatattaaatatcccagaaattgcaatagcgttaggaggtggaaggcctcatgtgctatgggacagttctggaagaaaactaacaaaatattccataagaacagtcgtaaaaaccacggccttctcagccctcacttttatgttatctgacgcaacccttcttgtccctatccactctctataaaatgaatgaaatcagcagtgaatctttgtgtagtatcatatgggagcatccagaagcgtagacagtaccatacaaataacccaattctccagtccaggaaatggcaaacaggctagtagaaaattccaaagggaagacccaaggactttttaaaatgaaaataaatttttgagacttaatcttgtgctgggaagttttatttctgggtgtaattttggtgaataggctaagaagggctggttagagttttgccagcattctccaagcacaaggagacattttgaggtaaaaaaatatctccagggaaccataataccctattttgaattactcccaattttattccagtaccacctctctggcagccatcctcagctgctactcaacaacccagctacacctctaactccttcaagatccatggcagtgacccgatttccaagattttcttttgtgtttatcatctacacatatctattagagatgtgctagaggaagcactctgctgggatgttaatgtatattgtgatgggacggataaccatgacctaatgtgaaatggtatcaggctgtgtatttgcaaatttgccttaatcctatatctttgtttcacacctctctctctcatgtgccaccatcaagcatccgtaacaggagcataaaaatgcagttatagaaatcagagcattttggaatcttaagagcaatatattaatacaagtattatatattgcagcaaaggaatttatcttacacaattttgtcatttgaaacaaacacacattatagtaactctctgcatatatatatgtacacacacatatataatataatatatatataatatgtttaaggttggctaggctaagctatgagatttggtaggttaggtgtattaaatgcattttcttgtttttaacttttattttactttaagttctgggatgcacatgcaggtttgttacacaggtatacgtgtgccatggtggtctgctgcacccatcaacctgtcatctaggttttaagctctgcatttcaacttaacaatattttcaacttacagtgggtttatctggatgtagatagtatcataagttgatgagcatctataagtatgtactatatatgtatacgtatatatcactctttgcctcagtatcttccactgacttcccaattcattcagaataaaatccaaaatccttaccgtggcttacacggctttacatgacctgtgttctgatacttacgtgaccttatcttcatcttctctccctttcactcatgatgcttcagccacattggcctccttgctcttcctcaaataggctgagtattcccctacctcagaggattagcttttgctgtttcctcttcctggtatacctttgccctagatactggcaagtctcattcccttacttctttcagttctctgcttaaatagtactatatcaagagttccttgatcatcttaccaaaaacccagcctttttgtttcccaatcctgttactctctttcctttgagcttgcttttttctcccagagctttttcacaattgatgcactatttatttgtttatgttttcttcttctccattagaacgaaactccagggagttttcttgttccctgaagaatctccagcttctaggaccacggctgacacatagtaacgtgctcagtcagtatttgttgaatgaatgaaggaatattaacaaagttaggcctagatagcacaactcatctccttgtttactgaattgatgatctatgtctttataaagggcttttatgactgtgaaatagttgagccttgctacatccaaccaactaaccaatagacaagtgagtaaaggatagatgtataactaatagttttaataaacaaaacgaaatgaaaacaatcattattggtcacattaaaacaggaaatgaaagcctctcagattctcagactttgaagatacatgttcttaaggaaaaatctttagatgacattatctatgagcctgactttagccaaagcaaatgtgcaaatgaattttgccttttaatggtttcgtcagcttgatgtctatggcagatcctatctacttcatctatgttgactagtgtgacccatgggcctgctgtattctctgtgtacattcagctaagacttttcacttcccacagtttcagtattctcacctttgagatcacagggtcttgcttaatggcctctaaggttgcatcttgtactaatgtgtcttcacagcacttcctacagttgaatttgatgaattaattttgtagtgactttttcatgtacagtacatagagattactgcattctctatgagttaaaggatcaggccaattttcttcattgctatacccccagcatttagtgtctgacacaataagttcccaataaaaatgtgttgatttgaataaatgctgcatgaatgaaataaatgaatgaaagtgattctaaaaagggtgttcacaaatataccaagcttactttttgataacttgctggaagaagttatcatcttcttcctatgaaatctactaccaatcttattttatttttaaacttgggctttgagatgtcatgatatcaattgactcattttagtaattttctgtttcattcttcttaagtagaaatcttgcctttaatattttaatgttaatgctatcttacaggtacaggggtctaactcacttaaatccatgctcagcgcacgtaaaaagccaatgtcttaatttccaaagacatatttcaaacgcagtgacatgaacacagggctgcctgattggattttccccctaatgaatggagaccataaaaaggacttatgtctagtatcaattattcatactccaacaacttgtgcatccacaagttatagctcaacctctttaccaacaataaaatgcatcttttctctgaacagaatgcaggttgctgtcaggtaaaaatatatcgtgacttgaacaatggatatttgcatccatccctgggaggcacggacacaaggccattacttgggtgaaacagaactgtcaaaacagaactgcggcaaaagaggccaaagtatgacttgagatattcttgctattgaaacaccagtctctaaagtttggagaagagaatggaagtagaacatttcttaaacccaactgctcttcagatcagcacagtcaactaagcgattcattgctaatggcatgttagcgtcattaaatattcaaaatattttagaagtaatgatacttctgtacttataggttattttttctttggggttgagagtgaggtaactgaggaagtgaaatcttgagaaaaatttagggcaggacaattcttttttaatgcaattgtctattgtggtgcactaaataccagtagcatctcccttgacattgcatcacctggggtcctactacactgtttcaaaaaccccttggcctggggtgacagcgatggtaccattagtcattgtgaatcgtacccatttaaaaagccagcacagaaaagggatagaaggggaggaggagagctgcttcttataatcgctttgaatttaagaactttggactatatccaactttgcccttattagagtatttgtgcaactacattctacactgtagattatagctctataaaacacatttgataatcgattcaacatatacttcttattcagtgcctactctgggtgccagtatagagtcatgcattgagcagacttacccctgttctcagggagtttacagtctagtagaggaagggcacagagcagaaagaagtaaacacacatttatttaactatatcttggggtaagtgctatgaaggcagcgtatagggagtgttgatgcagaaaaatgaataaggtgttgttagagacctgctcagatcaggttgtcagagaaagctaattttatggtttggtatttaacatgtgacctggcctacatagtggctcttgtctgtaatcctagcactatggaaggcctgggcaggagtatcgcttggggcctggagttggagaccagcctgggaaccactgtgagctcccatctctacaaaaaataaataaaaaattagccagccatggtggtgagcacatattgtcctagctactccagaggctgaggcaaaaggattgcttgagccgaagagttggaagctgcagtaagtcattattgcatcactgcactccagcttaggcaacagagtgagactatgtctctaaaaagaaaaataaaaaaaaagtaagaccggaggaatgaaaaagagtcagctatgttccagacaggaatcagaatgtgcaaaggccctgagtttggaaagagcatgtcaacaataacccgaaccaacaattgtgtagagaactggcacagcacagtggataacagcaaggatgctgtggtctccctgctcaacttcacgtgccatggttagatgtgtgaccttgcagaaggtacttaacctctctaaaaatcagttttttcatctgttaaatgcagataacattataattgtatgaggtaacatttgtgaagagcttaaaatagtgcttgatacacattaagtgctatgtgtttgttaaattaaaaaataataagtaggagagtggaaagaagtgtcaagcaactggagtctgtatccaaggattgctaccaaaaagctgtcccatcagcagtaactttgaacaaatctctcatctcttctgtgtctgttttcttacttgtaagtgttacacaaaaatattcctatgctgtctctaagagtctatgtgattctttttttattggtttgttcattcttgactgctgccatgtgcattttattctttttttaattgtaattttttattatactttaagttctgggatacatgtgcagaacatgcaggtttattacataggtatatatgtgccatggtggtttgctgcacccatcaacccatcatctacattaggtgtttctcctaatgctatcccttccctaaccccccaccccccgacaggccccagtatgtgatgttcccatccctgtgtccatgtgttctcattgtgcaactcccacttatgagtgagaacatgcagtgtttggttttctgttcctgtgttagtttgctgagaatgacggtttccagcttcatctatgtccctgcaaaggacatgaactcatccttttttatggctgcatagtattccatggtgtgccacattttctctatccagtctatcattgatgggcacttgggttggttccaagtctttgctattgtgaatagtgctgcaataaacatatgcgtgcatgtgtctttatagtagaatgatttataatcctttgggcttatacccagtaatgggcttgctgggtcaaatggtatttctggttgtacatccttgaggaatcgccacactgtcttccacaatagttgaactaatttatactcccaccagtaggagcatctgttgtttcctgactttttaatgatcgccattctaactggcgtgagatggtatctcattgtggtttttatttgcatttcttcaatgaccagtgatgatgagctttttttcgtatgtttgttggccacataaatgtcgctttttttatttttttaaaaaagacagagtctttctctgtcactcaggctgggtgcaatcataactcactacagcctccaactcctgagcttaaataatcctcctgcctcagtctccagagtagctagggctacaggttcacaccaccatgcctgactaattaaaaacttcttgtgtgtgtggagatgggatcccactgtgttgcccagactagtcttgaactcatggcctcaagcaaccctcttgcctcagcttcccaaagtgttgggattacaggtgtgagctactgcacctagccattttgttcttaagaagacagtggccttgcagaagtcttcatcatctgaaagctggttagtggtagagttgagactagaacccaggtctcctgcttgttttctcaaataaatacataatgcaaacacagaacagttgagaagagatgctggtctattttaatatattagttgactcggatatttttaaaagaatgaaagtgtctcagtcagggccttggtaagaagtcgatggctacccatatggagtaatttgaagagagttcatgaaatgcgtggatagagtgaagggaaactacaggcggtagtgcagtactccatgactagcagcaatagggaagctttggcagtcctaggtctaaaaggggaaggagagaagctagaaatatagctgtttggagaaggcatcccatgggaattggacttttgtttgagaggcaccatccagataaatacttcaagtaagtattccatcttcactctcctttttctttctgctttcctgaatggcctctccattggccaaattcaaccagaagcacaactgtcaagggaagtccttggtgcagtccaagcagtgtagactcctgggcagaaatagaggggagggtgtggagagtggatttgtaaagggaaggggaatgtgtacacagtacaaaaaaggtttaatgtcaatggtcatcttaccttttatttctattagacattttgttcatccaacacttttagatatcttatgtcatgccagatatttgctcaaaaaatcattatataatgaagtgacgtgtggtcctcatttttaattctgctgacattgtaaagaacttgtgccaatatcatggtcaattcacataaaaattaaataatgaatttatctaaattgttcaatataattattgtattaattcatttcaatttggcaaaacaatagtttcaggtaagtactattttaaggctacttatgctgtactaggagaaaaggattagtcattgaaatcattgtattctgcatgtaatacagaaggcaggagcccaggttgagcttaactgctcactctcagcatttaaaggactgagctcggggagcggctctaccaagattttctttgcatgagagactaagaagtctcctaggcaaggttcatcctaggggaagaaagagttagaattatgttcccataaaaatgtcccgggtttctgaggagaatataattgttttaatataataaaagcacaatacctatcactagaatttgcctaaagattatgaattgaaacatttacagtatccaaaactgtaaaatggggataataataatacctatgccatgggtttgagaggattaaatgtaagttaaatgtaaattgcttagaacagtgcttggtgcacacatacacacacacacttactgttattattaattaaggtaacacatttctagggatgattccattgagaatcaatgtttttacagtggtattactgcttctcagaacgtggataaatgcattatttctctccatacgtattaaataataatagcacaaaagctggttgcaattttataacccattttcagccaattttagtgtttttgtttcttttcagaatattcagtagtttttcaacataccctggagaaatggtaacgtgaaaactatggcatcttattttagtaaaataccttagtgtatcctttggacattgcttctgaagtctaaattacattagaatctattctatggatatacaattcatgaagcaattattttctgatattcagttggtattctttttatgtaagaaacgagaagcttaattttaagaattataaaagtgcctctcccaaactgacatgttatcctgttcccactaagtgagtcattcaagatgagcacattcctcttatgaaggggcacgtgttaatactgcacttaaaggcacgatttaactctatctggattgacatgtacatcaattaaaaactatgaagctacagcctttgttcagttgtctgactcatactttagattatggactacacttagaatatgctactcactacaaactcacttcctctaattcttaaagttcttttaatattccttcatgtcaaatattagttgcttacttaatatattcaatcatttttaccatgtcccaaatatcatgtaggtactccctgaggactacaaatatccaagggacagtcttggctctcaaagagcttagaatctaatggaggagacagacatttacacaaatctattacaaggctacaagaggggtattggattaggtaccaaaatggctggaggtgggaaatgattaattctgattggaaaatttgccagggtcctcttctccgggtatcagctctttacctagatctggaaagatgaggagggtttctgcagcttaagtgagggtttatctatcctcaggcaaggaggtaagggaattagcaccgtgtgttcaggtggtggcaagggatgaggagggtggtctccaaatgcattttcacaggtaaagcaggagttgaactctgaatgctttatccctttggatggctttcaagttcctttctagtcaatagggaagatgatatgcaaaatgtgtgataatcaagacattaactgataaggtacaaaaatggggaatctgatcgcttggatctcttcggattttagtcagagaaaattattcatcttgcagaccatggaaacaatgcaagatatcttattcatttattagccatgacgaaacgagattcagaaaatgattctcttgcttcttcctcacatttagaaatggcaggtatggttcaggcatggtggcttacacctgtaatttcagcactttgggaggccaaggcaagaggattgcttgaggccaggagttcgagatcagcctgagcaacatagcaagaccccatctttacaaaaaaataaacaaattagccaggtttcatggcacgcacctgtattcccagctactggggagactgaggtgggaggatcatttgagcccaggagttgaggctgcagtgagtcatgatcatttccctgcactctagcctaggtggcagaatgaaaccctgtctctgaagaaagaacaaacaacaattaaaaaagaaatgacaggtgatacacactcaaaagctattcatgactgggttagaaaaaggagaacagagactgggcacggtgactcacgtctgtaatcccagcctctgggaggccgaagcagttacatcacctgagggtcaggagtttgagaccagtctggccaagatggtgaaaccccatctctactaaaaatacaaaaattagccgggtgtggtggctcgcgcctgtaatctcagctactcgggagcctggggcaggagaattgcttgaaccccagaggtggaggttgcagtgagctgagattgtggcattgcactccagcctggccaacaagagcaaaactccataaaaaaaaaaaaaaaaagtgagagcagagcagaaatagaaatcaaagtctaaatttttttaaaaaacaatttctccttcatgcttccagagaaggcaaatattcctaacacatgttcccccagttccaaccatttccttggattggatgtttatttttagggaaggcattcaggattagcttaggtagcaacttgatccactgaacactcatctgggaacttgtcttggaattattttcttgatgaagattaaatatctaggaacagagttgaaacaaaggttagaactgggactattttaagactcgtccataaaggtatgtggtgtatgtgctgtacttcattccctgcctaatacgatgggctttagtgcagctcataaatgaagttcatgagaaacacaagccttgtgtgtatcttttcagtatttcttaggaatgtagcacttatctagttaatgtggtccttgaatgttgccagctccattctgctcctgttggttcaataaaagcaatttgatcacagccaagcatggcttgggattctttcagctgttgagttggtacattcttattagagggaaggtattatcttctacattgcctaaactctaaataatcaacttaaggagagtaagataaaatatctttgctatggtacaccaactactaagatggcccccaaagctctctgcctcttggtttctgtgtccttgtgtaattccctcctcttttatgtgagatgaacttagtgtcctgattctaaagaacaggttatggcaaatgtgatgggatatcacttccaatattggatttcgtaagtctgtgacttctgtcttcctagcactctcttccactccatggctcttcttgcttgctctgggggagcaagctgacacatttaaagttgtcctacagagaggcccatatgccaaggaattgagggtggtttctggccaatagctagtgagaaaatgaagctggcacaaaagcctcggagggactgaatctcgtcaatgaccatgcatgggagtgagcttggaatcagatactttctcagttgtacattgagatgacagcagcctgtgacagtccctgagccagaagacccagctaagccaccctcagattcctgatccatagaaactgagataatacatgtttcaagccactaagttttgagttaaatttgttacacagcaatggataacaaatgcacctgtttatagaagtggtgaggcttcggagtggggcataaaggaaagagaatatgtatattcagttgcaactatcagagtcaccaacccaggtaggatctttgtaacagatgttctacatatattgtttataatcattgcaaccacgtggcaaggatggtgttattcatatattttgaatgaaactgaggttatggaaatgttgttatttggctccgtacatgtagttagaagatgacagagatgagaggggaaacaaagtctcccttactctgaagccttggttctgtcccctgcattagagggatgttagaggcctgagtggggttaagtaggctggaaatcagaatcacctgtgggttgctttatagttaatcatgtcactttccttttctggaggtcctgacaatgtttatactgaaccacactacacagtacagttgcaccaaagagttttgctcttgcacaagttcagccatatcccatgcagcttggccccaaatcagagaataaaaactatgcatttcagataggttttgattgagaatatggtagttcttggatgcctctgtggtgattaacaaggtgaccatgtgactttggcattctggtgttaggttgttttaattaagtgaaaaattaaaacaatagtacccagagctccactatttgatgagcttaatatacaatcttatgtgtcccagtccctactttacctacaaccaaaagttggcaaaatgagtttggttaaacaaggacaagttggaagtagagtggatgtatgatgagtgctgccgtcatttggtggtgggaacaagattatgaaaaaacagaagggtagcctacagccctgcaccttaggaagattaggtagccccacatgctcctgtagtggcttctgaagctgggtaggcagctgcagaattgattagactctgagaacaggctgtggctctgtttcaccagctctaacatcaggtctaaggtctctctcctatcatcagcccttcagctcttgcaacagctttcctgcccatggctctggagagggccagattagcctctcgctgctcatggttctcatgcaagttattgtcttgcttccatgggaatggactctccacacaaataagtgaaagacatcacaattagctgacaaagtccatagtttctcctggaggagattggagtggtctctttttcaatgacttcctgctatctcactgcgtttttgcatagatttctctagagtggcactacccaataacgtaggtagcccctagccacatgaggctatgcagcatttgcaatggggttaatgagacagatgaagtaaatttttcatctaatttcatttcaattaatttaaacttaaatgaccatatgtagctgatgattgctgtgttggataatatagttctagaggttgttctcattatattgttgttttgttaatttattttgggctaatatttattggacgttttctatgtgccaggcactatacttagagttttgtatatattcatccagtttttgcagaatgcgatgagactgataatattatttacattttccagagcagaaagttgaatctcagagatgaagtagcctgcttcaaatcacacaggcaggagacaggattcaaaataaagtctgtctggctccagccctgtgtttcctgtacagaagaatgaggcaaagtcagcagaaatagagggtgaaaaaaatggacacaagacaatgaaaatataatctgtgttataataggttctttcactttattgcttattgtaaacactttggccatagcaaatgttagtttttaaataaccgtaattcaaaactttcacatcctatactatttttccccaagaagcatcatctatgaaaacaatcagtgaactccaacagtctatactggtaatgtgcacattgatgctattatgacacttaatacaaatagtaaaaatactcatctattgtaggcttatgggtttgtaaaatgccttaagggaggccataaacaactcaaagaagagatggtgtggactgaactggcttctatttggggaaaatttgcagaatataggaggtacgcaataaatgtttattgatggtgaagatgagaaaaccctatttctgctgatctttcctttccgttttccttaaagaatataaggtatatttgtattcagcattctcagaatcatcacagaaaccctggcactttgagagtcttagccacagtgtaattgggtctgaccacacgcagaagaaaaataaattaaagcatatgtactattaaaattgcactgaaaactttatgtaagtcagggagcccctcaccagaacaggctgaaactcttgaatgctttgcatcctcatatataagaaaatcatcagtgcttaaagatcaaggaactcattcaaaacaaattcagcctttggaccttactggcaggtaggttatatttcagtcagatcaatatctttctaatataggtatttgaaagtaatatatgctacttataataatgatatagtaagcttcttatctgcaagtacaggtactataacttacaccttaaaatgctttgtttgattgtttcattcagcaaaattcttggcactgttttgggatttcactgaattttgatgatgatattggattaagcattttagatttaattgtaaaatgacacaaaaatctaatcatctatttccaatgttcaatatacaatttttataaatacatgaaacaattcatataaaaatataaatgttaaggtcactcacagcaaaatatggcacattagaattatttattaaatgctttatacatataaaggtaggcacttcataaaatttgcattttggtaaaaggcaacaatttgatgtcagtatcttaattgtgtcattaacttttttaagagaacagattatcaaaattttacgaagaagaaaaaaataatagttttaaggaaatctacagaagggaatctgaacttcatttcccactttatttttgcgagtctgttgtgtatcttcatggtcaagttctgagatttttgctccctgacctaaaatcctgtgggaataattgatttctcatcttttacttggaagtgaagtgtctgctacctgtggaacttgatacaattttttttttctccccacagttagaataacctttattctgatccactataaagccagatgatttttaggtggcagtagctggcattgaagagttcttggcttcaagcggctgttgagtctttttggtcttgttttaactccctaattaaataaataagatccaactctttctgttgtattcactcctggacatatagaaattcacttcacacccacctaaaatacgagcagaacttctgaggcccaatgaacccatctactatttgattttgttatcccttctggagcgtgtctctaccaagagcttcacaaagcaatctagtcattgctctttcttgtactaaaaccagagtacccgtcctgtaacttccatcaggacctcaaacagtgctaggcacatagtaaactcttaggcactcaaaatacatttattgatgaatgaaagaatgaacaattctagttctgacttttaaagctatatagaataaagttgcttccttgtgtgggccaaatcattctcccatcctacttagatcttctttttttccaggatcaatactgaaactttcttcacctagcccttaaacaacatgattatcagatattttgtcaattacattactcttccctgaatgtgcttaggtggatcagcagatctcttaaaatgtggttccatagaaccaaacattaatactccagatggggtcagctttgagcagagtagaaatcctatatctcctagcagggatattccacctgacacattatctgaccccaaaaagtattccttggagcaattctttcctgcctgtttctgagtagaggcattttattccaggcaagatcgcccattggcacatgttctgttctgggagatagattatttccttgcgtttccaggataaggagggggtggagaacgctgtgctggaccctgtggggtgggggagtatggaggaggcaagtctgcacagtattccatctcgtggtcgtgaccgtagggtggtggtcctgctgaaaaagaaggggaagagaacatcaaggagttagcaaatatttgcatttctactgtgttgaagccactgggctagatactttgggaggggacataaattgtggctgcaaaaatcttagttttattaggtcaggaccacatatgtatgaaagggtaagtgctctaaaatgtggtatcatgggtcaaagtgttaagaactggttgtttagagaaagtttcttgaaaatatgatgctgaagtggcagaaagagaaggtgagggacaattcaggttgatcaaaagcactgaagcgggagagcccttcatctcaagcaaaagtacatgaaagggagaatgggaaaagacaatgaggagtgcggttatatcaccatggtgggctctgaatgcaatgtagaatgtataacatgtagctatcagagattctttgaacatggtagtgaatatgctttgagaaaaccactctcagcagtcaacagaggcagaggtagataaaagaaaagctgcaacaatgtaatggcatatgtgagggatgataagggactcatgacagtgagggaaaaacattctaacagtccttgagcaaccaagtctttaggtgatgactgggtgtgtggagaaagagaggagaaagtgaaagaaggggttgaggtattaggtaccaagtacaggactcctataattggaggggggtggaaccattacagaaatatgaagaagacaaaaaaggaggacaagtaggttaggaaatgaagatgaaacatttaattttctgaatcttatatgaaaaattttctttattttgttactgtaccatatgtcagtgttttaagaaagtttttaaattttaaataattttatttttttgaattgacaaataataattgtacatattcatggggtacagagtgatgttttgatatgcataatgtataataatcaaatcagggcaactggcatacccatcatctcaaacatttgtcatttctttatgctgggaacatttagtatcctccttctacccatttgaaactatatattattgttgactatagtcatccagtggtatagaacactggaacttattcctcctatctagctgtaattttatatcctttaataaatttctccctatccatcctttttcctacccttctcagcctctagtatcctctgttctaccttttaatatactttatgatgactatacataaaagtctattttgtagtggtttcagttcctttctctagtgttgaaaaagaagtactccttgagctgaaatttatccacgtttccaagaactgaatcattttgcaacatctgagcaactccctcagcaaccagtctgatgaactgccagtagctgaatcatcatcaggatcctgatgctgcttggaaactgacatgccttaattgcctactgtgaatgtaacccaaatcacaagaccagtgtcataataatgcaaataagtgggcatgctcttaatactagaatggcagaaaggaacacacaacatttcaacaaacttttctaaatgtcttctattaggttgatgcaaaagtaattgcagtttttgccattaaagtaattgcaaaaactgcaattgcttttgcaaacgaaccttaatttgtactctttctaataagaatttgacagtgttctgataaacagacatagacatacatagggcttccactgatatgcagaaaaaaactatgtttttgatatggtttggctctgtgtccccacccaaatgtcatgccattttgtaattcccaatgttgggggagggacttggtgggaggtgattggatcatgggggtggatttcccccttgctgttctcatgaagtttttacaagatctggttgtttcaaagtgtgtagcacttccctcttctttctgtcttgtgctggccacgtgaagatgtgcttgcttccccttccccttccgccatgattgtaaatttcctgaggactcgccagccatgcttcctgtacatccagtggtactgtgagtcagttaaacctcttttctccataaattacccagactcgggtatgtctttatagcagtgtgagaatggactaatacaattttcttctggatctttttagtttgcctatctttaccaagagcttgatgatttgaaccactgactgattgccctgtacttggaggatgtgaggaagcagaattgagccaataaagagaagaggaagaaggagccacagaactgagtgggatgtcccctgagcactccttggtggagcaaaagtcttgcaagtctctagtgcgctgggcaggctgagggcgttcagccgagaacacagctctgtaaatacatcagcgaggatgcatatatacagtttccccagtgctccctcagacccttggaggctgggctactccaagctctgtttcctgcaaaaaaatggagtaagtcctgtggagtctaaatacacattccctctgcattatacccacgcctcgacttcattatatctaggagcactgagacaaagagatttataacaaacttcatccaagccaagaatgaaacacggcagcctccatgcagcaggaaacccattgatctgtttcttataagcatgtggttctatgctgtttttctgccaaagcttttccctgcctcccacttgaggagcatacaccagctgattctgcagattgactctacatcattctctgtcatgaagccatggcatgtgtttatgcgtctgtaacaaagcgtttatattctgccatctgcataaaaactgctgaaggacatttcagcaagaatccctatggtttatgcagctgcatgttgaacatgaaaatctaagatatgacagtggtctttcattcatacaacctttgaattttggtaaagttctgatgtaatgttaaagagtggtattttgaggactacgcatcaagatataaacatggcacatcttttataatatcagccactggaagacatttgaaataatatttgtataattgtgggctgtattatctttctttcttgcacataataaagtttcactggaagtaaacttttcaagtatcaattttagaattcctgattcatcctaagcggttttgttctttttttacaggtgaaatcatacttaaaagttgtatgtatgcagctggagatacgtgcctttgaaatcctttcataaccaatattctaatctcctatttaagtagggtaaataggccatttatcctcaacatctgatacagctgtctacaatattaaaacatttagcaataccatgaaattcggagaagaaatgtaatgttttctacccactcaggccaatatttctaaagctaatgtggtgggaagatgcgtggtgttacccaaactattcacaattatttcagaaaatttggaaacagaagaaaatcatccataattttgtcaccccaatttaacaaatcatatctttaaatactgtctcttagtcatttgtgcgtagttgcatccttgcagtcacagagtatggcctatactttttcactttgtattacaatgcaagtcttttcattctgctgcatattcttcataagctttattaatggctgccttagcagttattccatccactattcactattttgaggttaattttttattataattaatgtaatgatgaatatcttcttacacatagactttttaattattttttttttagaataaaattccaggaattaattagctggcttaagtaacacatacattttattgcttagaatacattataaaactactttcaaaaataattatttcatcttgtaagggtatacaagtacattatcatttaatattttagtaaattaagtaaaaatttaggtctttgttttacttgatcatttcttttgataacagctaggtttgacactgttttacatcttgtccactgtttgttattcatattgagtgaattttttgttgttgctctggactggtgatagtttctaaatgaggatcttaatttcaatgaagatataagtaagatataaaaaagtgcacaaaattatatatcttttaataaaaactctttgtcaaaatggtttattatataatttttaccttactgacattctgaagtttaaaaccataacaaaatatatagttattcatttaaaaaatcccttctgtgttatttccaagtttaaaaattagtcttctttttcagatagttgatacataactatcctgtttctgagtttacccatttaaatttatgtatttaatgcttcgctacatgtgttattttatttggtatatttttgcatcaaagtttattttttctaagttttaaatattggttaggccgaattatctaaatgtggcttattaaataatcctcaatttttatattcttttgctatgtctcctttacagtatataaaattctaatatacctgttctattccaatgaccaaggtgtatctttttgtaccagacatacctcaatttaattattactgattttaaatagttttgatacctggtagaactgatgaatctcatgccttatatttaaagacaattgctcattgcaaaccttctcatctactctcccccaaaccccactactcacaattttccttaaccccacccagaacagagagtttaaataaaggcccacacagctcctggcaagacctccattacccgcatccccagccacataaactcaatactgcccatttatcctctacaatggcctaacatgcaaagatatagtataacctattgttccccttccactcagatagcatcaagacaaattccatcaagcctcacatccctctgtcaccatgagaaagacaggtttccttattgtagacctttaattctggaaggctttgcacatcgatttgttaattttccaaaagttccccacccccttcactgtgctcagtggaacacagtctgtcaccgcaccctctttccctgcctccaccatgcaactcctgctttcagaatgaaagttctcctctgaccctgtctgttttctcaagaaatgagatctgttgagaaatcacctgctgagagtgagaaggctgaggggatttttgagttttgagatgaaagaataatgcatgagatggttaactcaggaagtggaaagggacattcacatcacctttttactctaattaaaatctgattttccaggagagcatggcttcctcagcagcactaccaaagcacagctattctttttcttccacatcctaccacctatagggccaggaggtgctcaggctgttcataatcttcatagccacttttcaagctattatctattcttactctttaaaaccttttgtagcatatatgccatgttggttttttttgttgttgtgtgttttttgttttcgttttttttttttttttgagatggagtcttgctctgttgcccaggctggagtgcaatggcgcgatcttgcctcactgtaaactccacctcccaggtgcaagtgattctcctgcctcagcatcctgagtagctgggactacaggcccacaggcgcctgccaccatacctggctaatttttgtatttttagtagagacggggtttcaccatgttggtcaggctggtctcgaacttctgacctcatgatcctcccacctcggcctcccaaagtgctgggattacaggtgtgagccaccatgcccagcctaccatgtgttcttttctagcacatatgccatgaaaaaagaagaatacaccgtgccttttttttttttttttttttaacagagtaggtgccttgctattttgcccaagccaggatcaaacttgagatcttcctgccttagcctcagtagtagctggggtgatcttatactactttctactccttcttgttatcaatatctgtggtgtgtcctaccccaaactttccttcactgaagacttaacatctggcccatggtctctctttcctccacaacttctcttatcgttcttgtgatttcaacatccacctaaccctgcctctcaagtcccttgactatttttccttcaaaagtctcttcacccttgttgttggcaataatagtgctattttgtaaatcttaattataaatctgaccaccaccctttagtatctttctagaatactcattccactgcatcttggacctcacctggatttccaatttactaatggccattttaaaggaattcaaactgatgtcacctctttcctgtcatggtgtcctttgttattcagcactgatttatgggccatcactaaaattactcttttgcacctattgtcaatattcttatctccttctccattgcctggcagaaccccaacccttattaaacccaacactttggttatcctggatcaatatctaggagcttaatgtgactaaagaaaaatgcacaatgatgctgaatgatttcactttgagtaaatgaccattttcataagtgttgtggtctttggccttgctcagaagccatacatttctttagacatttcacactcttcattttctgagattcctgtttcatgcttttttttcttcttaacctcaaatacctcctcagtttttttcactctcagcagaagacttgcttcttatttcactgagaaaattggcacgagcaaaaaagaacatcctttgaccaccaagtctacaactcattgaaactgtgtttatgtacttattgccttacatatgctgtacataaataaattgtctctgatcgtgctgtacataatgaattgtctctgatcccatcaaaggctagcccctatacttgtgtaccaaattcctttcttcctcagacttaaggacactgatttccaacaatcccttctatcttctgtattcatcagtttccccctttatgtttaccatcagtgtactagcaaaatacaaggcactactatctggatttctcaataagaaaaacaacaacaacaacaaaacctcttgacttcatgtccacctcagttttctctacccattttatagcaaaattttgtacttgctagctctacttcatcatacccataaattttgtctgtagcattaattctgcaaccacagttaatatgacatcaaagaaggttttctcagttcatgtttgaattctctgatttgtactaaaaacgtctgcctgggcgaagacttgactacattaatgtatccattttgtttccttccagtgtcttcaaggtgaaggcatcttcatagtcacaatattattatagagaatctttccagtatgaatttttgatgtgtaaagaagttacacatctgatgaagattgtttttaatattcagtacaaacacagaagttttctttagtatgaacatgagcttgtgatctctaaaaaggtttgatgagtactcagaagtcttctcatgtcagtgcacatactaataaggtttctgtcatgtgtgaattcagtgatgcaaatggggtatttatttcttaatgaagtatttccaagagacttgaaagactacaggccagttgttttattgaatgttccccaacttgggtttgtcagatattttctcatgctaagatttaggctgtgatcttccaggtgggacctacatacatgaaactgtgttgtcctcagagtaacacactcaaaggtccatgatctttatctgtcctttagtaaccgtaaagttactatttttcacctgataactgacaagaaatctggtggacacttttaagacctgcgaatatccttctcagcacattctcctctagatttagcatcggttgatgatttttggctaactctttctgtatgatggtcttaaaacaattcttttcaattctataactcccttctacatttattctttgacattcttctgttaggaagagccccattcccctctccaattgtttgtctaccctatctatcatctatctatctatctatctatctatctatctatctatctatctaatcttctattatctatctatctatctaaaaatcatttcacaggactcaataatatacgtcaaatctcatttttcttgatggcactgaaatctcttgctttccttttgttagtatttgacttttatatctttggcaagccttttgttacagttttactatattattttctttcagatgtgtatatcccaaacctgcttttaaaaaaaagggttaatatgatcactttcctttgttagcactgaagttctgaaaagtagtggaaatgtaaaacttgaaaattcttgccttcatgtggacaatttaaaaaataattgcaattaaagaggacgtctgttcattctacccaatatggcaagaatgaaagacttttggaaggtcactgtccaacatagggtcaggtatgacagctgaatgacactgttttcacctcgtgtagagtaataatgttcactctagggctccccactgtacactttcacctttgctaaattatgctctctgcatttatctgatctgtgggctgtaggactatacaataagttgggttgttatctcaattatcatagggttaattaattagtgagggtaaaagcattttgtgtttccatagatgaaagattttgaaaagtattcaatagtattatgtgttgcttcctaaaccttcaagtaaaatcttaattagcgcctttgagaaggaaatgagaagtaatcatgcacattatgttttcgaagacctagtcttttttgcagtaaaaatgttttcagcatgaggttcattatgtttcttccattattcagttctgagaacaatgcatttaataaaaatgcaatacattcctgtgacctgaaagtataaatgatgctaatataaagttttaaaaacatatttccgtcggctaattgaaatttcaaacccaagaaaacatgtgaccttacattactatcgtgacatttagtattttctaactttattcaaagtttgaacttacagaaggataaaataaaatattgaacattttataaaaatatttaaacattattttcaattaaacttttttgatcaagctaatgagtatctagaacgttatctgcaaagcaattcttcataccttctctacaattaatgtctttgcttgactttcttctgtttttctcttgggttatggtttgaccaagggaaaaaattcagaggtataaataataataaaaataattccatctatttttttccttatattccaacatctttacagtaaccctaccaatattcttgcaagttgggaatatttgaaattgcatgttacttttgtagtgagtacattccagggtgaaacttaaagtcaattccctagggtattgatatatgattaattcaggtcttttcatgagttgtgttcatcattcattcagctgagtgcccattatgtaccaggcctggtcttacatgcttggaatagagtgttgaacaaaatagaccaagatctctgcctcatggagttcatattctaggaagaggaaatgaacaataaacaatcaacataatgattagctaaactatacgatatcttggaagattaaaagcactctggataaaaagcagagcagcacaaagagaattgggatgctgtcagaagggacacattacaatcttaaatagggtgtattaaatcagggcagactccattcaggaggtgacctttgattaaagacttaaatgaagtgagggagtcagtattctaggcaaagccctatggtggaagtgtggccttgtgagttcatggaacagcaagggaaaaaaatgtgactggagacagagtggccagggagagagtagaaaaaaaggaggcctgggaaataaaaagaacagccaactcatgcagtaccttgaaggcctcagtaaagaatctgccttttactttggataaaatgaagaaccacacgctttaatgcctcctctgcgggaaatggggaaccgctggaagattctgagcacaggagtaatacgatctgacatctactttgaaaggttcactctggctactgggttgagaatagaccccagggggcaaagggtggatgctgggagaccagccaggatgttattagagtaaaggaagtgagagctgatgaagttctcctactaggggagtaacaatatctacttctcactgtgagaagtagtcaaaatactgtatatattttgaaggtagagccaagaagttttcctggtagagtgcatggtttctggcctgagcaactaggatagagatgccatcaagagaaatggtaaaggctgtgagtggacaggggttttgggggaaatccaacacttggatcagaaatccaagtttagacatgtcaaatttgggatatttatgagacactcaagtggagatgttcaataggcactgggataaaatgaattggtttggactggagatacatgggaggcattagcatataaatggcacttaccaccctgaggttgtaatactcttaatacaggcaaagaagtaagtgtagatacaatatggaagaaaagacaagactgagccttcaggtactccagtatgaaaatattatagaagaagaactggccaaagaggaacaagaggaattatcatacccttattgatctgaaatttgctccctcaagttgaagatgatagaggaaaaaaaaaaaaaagattgacagaggaaggacagaacagggaattaatacaaatacaaagcacagttgcatgtagaaggtaccctgttcttttcctgtagagacagagaaagaaaagacatgagtatggatgggaaattaacttcctaagagtgtgttaaatttagaacttgcctgctttttatatgtcaaattgtacatgcacagattgacttagaaagcattattgaaatcctctaatgcaaaatgcagtattttgtttatgaagtcacatgtactcaatatattttaatacatggaacttctagcatattctcaataaatatttgtcaaattattaatatattgcccttgctctttgttgaaattttttttttcttttgtatttttagtagagactgagtttctccaagttggccaggctagtcatgaacccttgccctcaagtgatccacccacctcggcctaccaaaatgttgggattacaggcgtgagccactgtgcctggcctgttgagaattttaatattgtgtttaaagctgttctctcgacctaatgaagatatatgaaaattttcttgaatgctttttctcaagacatatatatctattggatcagatgccagtttattgagacatacattatactttataaattacttgtcagtactcactagcaggtagacacagtgggtgtgaattgcttatttgtcttaattctggctgactggcaattgtagtcaatgaaacagacattaaaaatatgaataccttcaaaaaaaaagaattgggttgtattacttggatctaagcaatcttgattcagctagaacttcaatctacatgtacctagaaatactctatgaaattgaaggtggtttcattgaccatctagaatgtttccttctctctgtgaggagcagaggataactagcaaatctgagccttcgagagtcaacagttttgctcaccaggataggaggagacggtgttgatgtgagtcgtcctgaggatgcccacgcgggtcgccctgtggttcttcatgcacatgcagatgcatatggcaatcccagcaatgacccccatgataaatactattccaaaaacaatgcccgcaattgcagtgcccctaaaaggaaaaacaagtaagtttactcaaaagacttgtaagcattctttagactttctagtagagctccatgattataggacaagtgttttcttacaaatgttcttaaggataatgtgtgtgtgtttttcttttctttttttttttaaaacccataagttccctgaattgataaagcaaatagtctgtatttcaatagatatgaaaaagttataaaaatcctcttctagcaccgttgaccaattcatcattcagattccagttcttaaaattcatgttttgatacaaagcacaattctctagatatgctctccaaagtaataattttaaaaaccattctgctgtgtatctaaacagcaaagaatttatctgttgggcatagcatgtatgtgtttaatgaaaacaacttggtagatgtcagaatattaagtgaaatttaacactcattcctgattaacactcttcatagaacaagaatatttgtttcttaataaaagaaaaccaaaccaaacttcatatttttaagctacccagagaacagttatgacaaataagtatcccattaattcaggaagaacataaataaaacttcgatttctactaatgttaatggtttctttcccgcagaaagttttagctcatgcaacaaaaccataaatagaaaaaaaagccgaatagcagaaaagagtcaacattatgattgtttgtgtggaatataatttgtaggtaactacatttttctgttattttgaaaagcaatggggaaatctttatcaaaatataaattttgaccaagaagcatcatttttagcaatgctccctaaggaaatgtagcacataagcataaatactataacaaggatgttcatcacagtgttgtggctaatagcaaaataggagaaacatcctaatgtccataaaaagaggactgacagaaaaaaattcgtcagaaaaggaatcttacatattgattaaaaagggtcaagagatccacatggattgaagtgaaatgtttatgatacatggttaacttaatagtaatactattactattgatagtaatttgtattcattcaattaattagtgttagcttccagcaccatccatgtgcctgcaaaagacatgatcttgttcttttttatggctgcataatattccacggtgtgtatgtactacattttctttatccagtctgtcactgatgggcatttaggttgattccatgtcttttctattgtgaacagtgctgcaatgaacatttgcatgcatgtgtctttatggtagaatgcttcattttcctctgggaatgaattagtattaattgaatactaattcaattaattagtattttcaatacttactagtattgaatactagtaattagtattgatagtaattagtattgaatggaaaagcaagtattaacaggatactaccagtaataacagaataattgccatgaggtaaaactgcatttctatgtatcaagttttttattatctacagtgatgatcttgtaaatgtgaaaaataaaaatattcactttctcatttgcatattccacaaaagcaaccacttcaaccctttcagttattttttctaataccctctctcctatttctcaatattattattacattattttatattttttgtttttacacattatttattgcctcctcttatactatttgggaatgcagatctctcagacaagatttatccttggttaaatcagtcttcagtatttacattgccataactttgctatctgctgagccaagcaatgtaccatagttaacttttacaaattattatcgcatttattttacaacttactatttttaaacaatttccatgaatttttatttttccatatacatattgatatctgctccttgcaaaaattcctagaaatctttcccacattatcagtagctttttcatactcaaacatagtaaaatagcttatcagttctgttctgctcccctgatgatttccttcttacagcaactaagactactggttgttccgaacctggaactgttccccttgagccctgtttgctggtcctcacatttagtttctggacccaattcttgctaattcttggtgaactgcattgtttgttgaagcacgttcctgaatggcttcttaaaaatcgactcaaaggaaagtagatttttcaagtctttgaatgcctgaaaatgacttaatgcttcactcttacgtgattgataattcatctatgcatgaaattctaaactgcaagacattatttcttagaaatatgagggcattgcttattgtcttctagaatttggagctgctgtaaagaattcccatggcattataattactttcctttgtgtgataccgttttttcttttctttctttctggaagttcttagcattttctttttactcttggtattctaaaatttcataatgtgcctgggtttaaaatatatatattttccaggtccttttgattctttatgttcggagactcacgtccttcagttgttgaaacttctccatacaatgttaattttttcttcactattttctgtattcttccttctggaaactcattctgaaataagcttttgaactttctggatcgattctctaactcttttttaaaatcctttttaaaaaactactgtctggagaatttcattgactttatcttccaaagttgtactaaactttaaattacagttatcttatttttaattttctggtgctttatctcatcctctattgcactcccctccctgtttccagtgtctgtgtttcttccattgatgcagtctcttaatctttgaaagcaccaatgatatattctttgatactttctctactgtttgtatttcctcgtcctgtctgggttcttttttattgattgttcattttgatctcattcatatttgatgttttcttcaaatgtctggtgatccttgaattctctcctatcaaaaaaaaaaaaaaaagcttgaagtagctacttggaagtttagtttgcaagccagaatttgacaggtgaactccaaagaacaggacaaactgagatcagaccatagatcttttccttggggctattcatttttctccatgaaagcattctccaatttcatacttggggagcatcagcctcactgccaatatcccggagcttggaattgtactcataaggatatgaactttcatgaaatccttacgctttcatctcagacacccagtctctggcttcgctttgtcggctgtcttttgggtttcactctggaggcttacgggtttaagtcttcacaaaccattctttgttgtgtaaaagcatgatctctgaaggcagatcacctgggtaccaactatagctgtggaaccttgggcatgttgctcaatctctctgtgcctcagtttcctcatttataaagggaaggtcagtttggtgctcatttgactctcctcccaaatttcttgtcatgagtcttgtgctcctggacttatctgttgggtaaataggtccttattctcagtggtacctgaacacctatcctatacttttctgagactggccataatttcttaccccaaaccactggggccagatctgtctcatagtcagaaattttcagattttgtaaagaaaatacatacactacgcattgtgaaatattcccaggggcagctagggcagcatgttgagaacatttatattcctacagcgaaggtgggaatattaacgctgttagattatatggggactacacaaaagcccaaggttggttcaggtcaagtctggccaccaactgacctttatctgcaattctgaaatccacagaaaactctgaaaactgaaagtgcacataagggattgtgaagctgtatttatactttccagaggatattttctctctaacacttttccccacctacatacaaaaatagaatgccattaagaatatcaataatctcctttaaaatacttctataggcatttttacttagttattaagaaggcagaatgtgagacatatttggatgtgttgctattagtaattaaataatagcagagtccagtagtttaataaataaatcttttcaagaaaaaaagatctatgaaaggagataattcgaagtgagaaaattaaaagtaatctggaaacttcctttattgtaagtttcaggtccaaataagattaaactggaggacttaatttatgttccagaaataatcaatggcccagttattcaggcatagagtttccaaactatgtgttatggaagctgttaagatatcgaattgggacatatttatattcattaattcttttcttaaatagaggaaagtagaaaattagtcacattttgtttccttgttggcagctccagcaaaagtgcctgctcttgaggtcaataatgaggttgcaactaatgtattaaattagtttttttgattaaatcatgaagttggtgcccttgatcctttgatacccattagcaatcgtaaattagttatttaagacatggcaagtataaaatttacagcattatttactttgtaattaataaaaagaaacaataaacaaatagtaactttcctgcatataaataattggctcagtcaactgttggaaagtgagaagctattaatttgaaaaatctggcatcattaaaaccttgaaaaaatttcagggaatgtattttttttaaaacaacgccttgcaaggtttgcacattttcctctctccttttaaacttttattttaaaataattataaattcacgggaagtgtaaaaagagtacagagagagctcacgtacccttcacccagtttccccagatggttacatcttaagtaacaatggcacaacatgaaaagcaggaaattgacattactataaggtgtatttatagttccatgtcatctgaacacatgcacagagtcatataaccactacagcaagcaagatacaaaactattccatcatcacaaaatatttccctttcgctattactttgctttatggtcatatccaacatgccttctctctgccatcaataaccccgggtatcagcaatctgttctccgtttctgtaatttagtcatttcaagaagattatacaaatggaatcatacagcatgtgagttttggagatagtcttttttccctcagcgtaatgcctttggaatccattccagtttctgcatgtatcagtagttcattcctagatgagcaagcagtccatgatatggctataacacactttgtttaaccattatttattgtagggcattttggtttgacaaataaagttgctataaacaatcatgtacagatttttgtgtggacataagtattcatttctctgcaataaatgcccagaagtgcaattactgggatgtacgataaatgtatgtttgagttttaaagaaacttccaagttatttacattcctaccagcaaggtatgagagatcctctctgcgtccttgccagtatctagttttataatctgttttttagctgttttaacggataaagcattaagtgtagtggtatttcatcatggccttaatttgcattcccgtaatggctagcaaggttgaacatgttttcgaaagcttatttgccattcatcttcttcagtgaaatgtccacctgagtcttttgcccatattctaattggattgcttggttattttactgttgagtttttgagaattatttgagtcctttacaaaatatgtagtttgcgaatatttttactggtctgtagcacatcttttcattctcccaacagggtcgttcacagaacaaaagtttttaaataaagtccaatctatcattttttttcttttatggattgtgctttggggtcatacgtgggaacttttcatgaagccctaggtcctgaagactttctcctatgcttctttctaaaagactgattattttacatttgatatttaaacctatgatctatttttgtttaatttctgtacgaggtattagatttaggttgaggttcattattaccagattattttgcctgtggatagccagctacttcagtaccatttattaaaagcattcctcatccccccatcgcattgcttttgcacctttgtcaaaaatcagttggcctgtgcaggactgtttctaggttctaatttagctaatttttttttctttttttgcaaaatgagattttataatcaagatattaaatgtatctatggtggctgaaataatatgaaactgtcttttataacaaagctcagagataatatattttattccataaatcgcttttcatgagtaaaaaaagattctgataatgttgccatgttgcagtaacacttttaggcttagcactgctatacagcagcttactagttatcttgatgtggttttactattaatattaaataatatttaaggaaaatagcagatatgaaaagtacgccagagtaatatttatcttcttctcggatacgacccaatttacaaatgcattttataaaactataaatcaaagggcttatgaatattctatgtaataatttagtaacagcagtcccaataaagtagaaaaattaaaaaggccatgcggatatttgatatctatatttgataccacacggatattttacacctatacaaaaagtggggaaaattctagaatatttttgttaggataaacttccatatggaaataagagtttgaaataaaatacctttacctttgaaataagtcaaaggtaaaagtatcagaagagagagttctctggaaaaagtaaccatagcttcaaaagaataaacttaaagtaggtttatttcttattaaaataaaaaaattataagtgaagctaaagcatttttatcttttgttaaagaaggtaatatttagtcgacttatttatttgtgatgatacacatgagatgaattaagcaatgataaaaatcctattcctactacagcgctgaaagtcgactacatacatgagaataaatcttggcaaaattctatatcagatcatcctacttcctcaataattcattcttttggccaattcattaaaatactgtaatacccttgaatacaatgttttattataaatcattggcaattttagtaacactttgacttgcttaacttaaaaataatgcattttcttctctgttgcttaaataaatacagaaaataatagaaaaacaaactcaatggagtatcattttcaatattaacagtatttacttatattaatcgtaggatctcagaactatctctatttctatttttatctctatgagtctggttacatgtacatctatgtatacgtgtatcagataagaaaaccataatatcgaatagttaaattgttattaaatattgttactactccaagtgtaaaatgcttaggagggtaggaagaccaatccatgtaatttttccagtaagtctacattacttgcaaaaaaaaaaaaaaatctgtaaaatccaaatatgctaataatgtttttttattttgctttttttttttctttcattctggtgactccccttaataacttcactcaatatatcctctttcttggggctttatagataacttctttctgttagcctcatgataataaaactggaaactaatatctctttgaatgaataaatttacgtgatttattgactcaagccccatgacagagacaattgtgtaacccaatattcattttctacattttccttgataaaagaagtctgagggttgactaaaataaagactacatcttcccctacttccttccttccttccttccttccttccttccttccttccttccagacaaggtctaactgcgtcacccaggctggagtgcagtggctcactgaagtctcaacctctgggctcaagtgattctcccacctcagcctccctagtagctggcactatgggcacacgtcaccattaccagctaattttgtaatttttgtagagacaggatttcgctatgttgccaggctggtctccaactcctgaggtaaagcaatctgcctgcctcagcctcccaaagtgctgggattacaggcatgagccaccatgcctggcgagtactacatcttccaggtagccttaaagctagtgttttgttttgttttgttttttacatgttgagttttggaaaataagttgtaataaaatattttgtgtcaattctcaggaaacctccttaaaagatggctggaatgggatttttctcccattttctgtcttaccttcctttcagctttctgaaataggagtgtaatggctgagctctagtctccaaggtggaccatgaagacaagagccatatcctagggatggaagaggtatgagtttgatggagtttgtatccttaataacaacatggagatgctgtatcaactcccatttcctttgcacgagaaacaaactagtttaaaaaaaattattaaagtctctgttattctagtttgagtgtgaatgtatgtgtgtgtgatatgctacccaacctaatcttacctaatacaattcctttgccaaaattgctatacagtttaaacaaaagcaaatatttaatgtggaaatggcagttttaaggaacatacaggtactctgggatcctgtagaaaagttctaaaaaagcatatcagaaccaggaaagcaagagactgcattcaatttcattaattgggattgttcctcatatcttacgtagaattaaactttatggctcagtgagagatctttaagaaatctatacattacttcgatgtcaaagtagtatacaaaatgagaataaaaagtgctcttgaatatgttgtagattgtagggtgatctacagaataacactttatcactagagttcaatggtaaatgctttgattgatgaacaaaaagtaccctttaagaactgcctggttagcatttatttgcactgactgaattatctgaacaagtgccaaattcttacatgattttgtgccaatatagatttaatgagagtcgaatacatatgattcaaaaatggtcatattaaaaaaatcaaacacgatttttcagttttctgtaaggttttatatacatgcacatacatattgttttatgtatgtataatatatataatataagatatatatttaactgtgtggataccaaatgtcatcatttggttagttgtcagtacagctttgagactgcacaacacaacatactatatgtcaaaatctaaatgcagtaaatcatagttacagaagtttctagaacattttaatgctatgtacatgaaagtgattcatttaactgtttaacaccaatatttggaaaagcagtattgactcagtagtactgaaacaggtataattgtatccccagtaacaacatggagatgctatatcaactcctgttccctttacatgagggagaaacaaactcgtttttgaaaaacaaaacaccttagatgtttgatttatccctcagtcattttgcctacaattctaactgactaccactagatagcgacattcacgacttcactcattaagtatatattgagcggctgggggcagtggctcacacctgtaatcccagcactttaggaggctgaggagtgctgatcccttgagccaggagttcaacacaagcctggccacatggtgaaaccctgcctgtacgaaaaatacaaaaattagccggtgtgtgacacacacctgtagtctcatctacttggtaggatgaggcatgagaatcgcttaaacctgggaggcagaggttgcagtgagccaagatagcctcactgcactccaacctgggtgacagagtgagaccctgtctcaaaaaatttaaaaaaaatatatatatattgagcatcactacgtgctagcactattctgggtactacgatacaaagttggatgatacataatacttgactttaaagattttagagccatgtactagatagcaaacaaagagattttgaaggtcaactatctccaggcatagaagactatgacaagacaacaatgaaataatttggtcatactcagcaaaagagaattgtttttctttttaaagtataaatataatacactagagagaatagtagtaatttcttaatgctatttcttggttacatgtaacagatttttgaatcagagagtacttttgggacattgaccacaactcacgtgttttgaaggtaagaaaaccaaatatgtgaggacctaaaataaaatagttgccaaagttcttccagctagttttgtggtagagttcaaactggagcttggcagtcctaatttccaccacggagctgagtagattgcaatggcctgccttgctctcattttctcatccactcaacaaatgctatggtgtatcttctttgtgccagacactctactaagcactaggcatgtaaagatgaaaaaattctacttgggaagtagagaaagagaggagaaaagaattcctggaatgtctgtgaaatttaagctctaagacctgatgactgatccaacgggggagtgagtgaaaggcaagagtgtagaatgctttccctatgggtgattgcattctgccacacaatacagtctatcaaaatgtgttgaaaagaaaaatatgaaacatggaattataaactagagccaaatagatacagctactgcacacaggctttcctgcttttctcattccaagcctaaaaaatcttcaattacttccagatacaatactctcatttataatgcattggcatggttcacccttttgaagtaacctttgctgaaacttcccactgagctaattatcttaacttgcttatggtgattactttagacaggactttcttctttttctttctgtacctttttgtcatgctttgagtggaaataaaaactcacaaactggttttttaatagtgactacaaggatttctattgaaagtccatttgttgagatttaagtcctgagagcatataagacttaaaagattgaatgcgatatgaaaattcagagctaatactctttcctttccattgactcgaagatggagagtttcaaataaatatggaggctcacacagtcaatgacctggcagaacagcatctgctttttgggggcagctggatatttaaagatttaataaggattaaatatttaaagattctaataaaactcatgttgatattggagattgtaaacctttccaaagtaactgctgaaggaggtaataaactctgatggcaagtagactccagacaatgagtccacgtgcctaacccagtgtcttctcctgtggctctactgattgcttttgtctacacattacaagctggcctgcccacccaggccactgtgatcctttgcctgggccctcgcaagttcccattctctgttgagacaagcctgtgactgatcgctgtctgctggggagatctcctgttctagggctgtcagtgatttgcctggttctgacatttattatctgcacacaactctcacaagcctgaggctgcccagactcaacagctcctgcccagtcacacctcctcaaatgtcttgctcacaaccttacctgtgtcagcctgatgtgattgattggagctgtcatactttggcttcctcttagggtctagcttcgtgcgcattaaaattcacaagcaacctattttcatcatagcatcaatatcattgtctttcactatagatgctgctaatacacagctccaaagagtttctgagttttatgtctatccattagatctcaatctcatcttattccagtatatacaatcccagagaaggaacgtgattggcgttgggaacctacctttgtatcaattcacatggccaaggccagagatactgtaattggcctagctttaattagatacctgtccttagacctgccatttgtaaccactgagaaagacatgagggaaatagaggtgctcagtttagtagcagaggcaggggaattggcaaacaatgacacagacattcacacacactgcaactttgtatggttggcattatttgaattctaggttcaagtttgcacctacagatgtgagctagaattataaagaatgaatgacagagacagatgcccccaaatctcagttccatttatctttcatctaaacatataagtggtaccacaaagtcagaaacgtacctttgggcacgtttgcaggagtgaggctacgaagagttctagtggccatctgttctggcagatcatatttcaaaaaaaaaaatctcaaggtcgaagagaataataaattatgcagcatgaaacaattttaaatatctctagcctacctatgatgttggaaatttaagggagactaagactgggaaagacacacgcatatgcataggattaaacgcaaatggggaagtgcaaactaggttctatgagatcagagaggacggcatctatcatatatgttagcatgtgtgagagtgtgtgtgagtagagattggttgtgtgagagagaggttgtgtgtatatgtgtgtgtgtgaaagggtaacttagggagttaaccctttctgaatcctaaagggttgacgggattagagcagaagcacatttcagatcaaaagaacacagaaatgccataggaatgcaatatatcatgatgtgcttcagggaccatgaaaagttgacagttgctggaataaaaaacagagaggtaaggctggagaataagcagaggtttgggtggggtcttctggataaggaacgtctttaataatactgtaaagaacttgaactttttattggagttcatgggaaacaaatgaaatggtctaaacatggatacgtttaagggtaacatggagagtggatttgatgggtaccagactgcatccaggcattctaattaaaagactgttgtaaatatctggacaaaagatggtaaaagacttaacttggcaatggcagtgggacaggaaagaaggtggggagaaaagaattcaggaaaaacattgaaggtaaagttagttgtgtcttaaagttaccaagttcaaactcctaaaggactattacaactctatcctattccaagtcacccaaagctactggacactcctaatatttaaaagtaactaagtctggaggaagtttattccactgtggaatagcaccctgaatgtgtgtgaaattttaaggtaaatttggtctactagatctcttactgttcccagaggagtgacctctagaaagggaagtttctgacaccttgtaggaaagaagggatggatcaggcccagaaaggtatcacaaagagtgcaggagataaactttgcttactgttgttgcttactggtctgactttaaccacctttgttttccaaagatgaacatgtttataaaatgcatatctactctttaatactgcattacataaactttcagcataatgagcatgcatagataggaagtttgctttacttgtattatcaatggactcttaactgtccttctctgaaactaatgttcttaaacttctgttaaacataaattaaaaataataatcttttagttattcttagattgcttcctgcagtctgatctttccatccaggtctttgtgcagttggaatctaattggatcagacaatgcccgaggttccctccagctccctagtaccacaactaattagcagaaattctactttaataatacagttgctgcaggtcaagaaagaaaagcaaagcagaaatggaaatctcagcttaatgaacattgaaaaaagattagaagtgagttaaatttcggtgtgataattaattacagtccaacaagaacaaaattctatgaatattgactagctgtaattaacctatatttattcacacaattatctcccccaacatcacctccatttctgaggggggagaaagagaatatcttctttcaagaattcttatgtattgtcaagataagcaacaatctcaagtctgtggagatgtaataattatcaaggtaatattaaatatataagtaattataactgcatgtactcattcatattatctagctaaattttaattacttgtttctaatttggaaagatatacttttgtctcaaagaccttggcaaaagatggctacaccaagacgcagtagttggtgtggaagatatcttctgtgattttttttttccccttaaaagagtaacagtttcagaatattctatgcttgtatacacaaactgggacatcacattgtgccccataaatatatgtaattactatttgtcaattttaaaaggagaagaaaagatttaaaaatcagatgtatttttagaagcagttactataatgtgtttgaatgtttaaactgtattctttgaaattcccatagaccagggtgctacttactcttgtaagagtaacgtgttacagggaacttaccagagagaagatttatgccagggttgagccatcggagtgatggttcttacaccacaactttgtttcttttctatgtcccagaagtcagagaaactgaattctgtttcatgtaccaggacaggcaaaaggaaagaggaacaacctgagaaatgactgtttttctaccagaggagcagaaagttagtcagtataagctgtgtagactgggagaattaggcaacctgcagttattcacataacttatgttgcctatgtggacaggcggaataaggagaattacagtctgggttatcacttcagatagagattcttctgatcacgttaatgcagattgggcagagagcggtagatctaacagcaacaggaattaaaggggtagtaatctttgggtccacagatccatctaaatcaagtgagtgctagcagcaagcttgcaacagttagggcttgccaaatatctgcgctaggctctacatttcccagcttcccacgcgtctcagaagggccatgtgactaacttttcccaacagacttaaagaaagtgatgtttacttcctgtcacttcagtaaagtcacgtttacttcctgtcacctccaactgcattggagggttgtctaattgggcattatgtgatccaattagactccaactgcacaaagacctgtttccacttcaccccttgtgctcctggagcagatctgcgtgactgggagcaaaggatcctgggagggccagcccacaatatggaaggaggcggagtcacacagccgtgacttgagagagagccacacgggtgaactgttgacgtgatcaagaaatgaaagtgtatttggctaagccacagagatttcagggtttatttgtttcagcagcataatcaacttcacgattaaaagaagaggatatggattccagaatcttattaaaatgggatatcaaaggggtttaaactcaggaaacaaaatggaagcactactgtggtgaatccctggaaataccacgttagtaggcagatgaaacttccaaggacttgggcgtggctgttaggcttccccagttatttagctgaatgtgcagagcagggcaccggatttggtaaagaatttgagggccaaacccattttgtcttggagtgaaggctgtggtcctcaactctggcttcaagttaggtttcaattaaatcacaaaaatgctgatgtttgggccttaagtcaaatcggttaaatcagaatctctggagatgagatcaagatattgttatatttttaaagttaccctagtagtgctaatacgtagctagattgggaatccctgagttgatgtaactagaggcaaatattttcacaaaggggtctgaagctgcttaagagctttgtctcaatagaaattgggttaggaagcctaggacagagtccaaaggaaagaaatatcagctagattcagatatgtggaactggaaaagaagaatattttagcatcaatctctcaagaaaaaaagaggtaatgacttaaagtacttccatcaacagagattatatgaaagaaatgctgttaatgaatattgctattatttttttctcagtctacaaaatgcatttaaaatataggaagaaatcatggatgtacaaaatgaatatttaacatagaatcatttttttctggtaaatatacaaaactagtaaaccttaacaagatgttacagaaatagagacactgaacaattgctggcaatcttttttgtttatatatagccattgaaggatatgtttgattatatgaaaatagacaggtcagtgcatcccaaatggggagaatactctagcaagctagaaatttccaaatttgtgtagacccggataaatagaatatttattgatatttatccaatacttatagaatatttatgcaataccctattgctgatctaacccacgttcagcaaggaagatcagtttcccaccagatgtgagtgaatcttaatggaaaggtatacattaatttcatttagtcatttataacttttattcaaaaattttctttgtttttggaccattaacatctagtaggatgaccaacttgaaaatatcttctggtaatgaaagatatttattgaacagtaacttattatttagttttaacaatttaaaaaggttaccaaacaacacacaactttgctataccaagttgcacttgtgccaaagttttaaaattttctttacttggaatcagagtcaactttcttagtaactttggtccttaaaacatcctcatatttggtcagatttaattcgataaggggccctttcctactaatgtacgctcagcaggaaatccagatcctaaaaattccagggaacaacatcaataacttattttatagaaatagttttggattatgccaatcaattcaccagtccatgatttcaaagatcgtttcatcaatcttgtatcattcatgtaatagaacataaaataagccctttaacaagaatttggatttcattctataagaaagacaaggtcatttttaaaaagcaaatcagctagcaagagtgctatgagaagaatgcctacaaagaaaaatggttatacagccttcagccctattccataaatcttgacttatatttttcccttctgcttctaggagatagtttgcttcttatatgattccctaagggaagttccagtagcacatggggctaagaaatataatttgctcttttactatttgaaattcaagttattaaactaccatggactagtgaagtatgacccatatccatatgacccaccttagaaggagtcatacacactgcctcgtacaatgatatcctaataatgtaaaactaataattaatttttgggggaccaatcaatttagaatcaaagcccctctgttatgttgcaaaatacctacagaatgcacattcttttctacattgaaagacaggtgaccacttcccttcagcagactcttattgtaagatcaatatgtgtaaatattgatcttatgccctctattgaattaaagtttgaactgtatgtcttattcaggtgacatatgtcatttgtatcatatgtttttatttggtttgaaatttcaagaagctaaatttgatgtcagctttccaagatttctaccttttacatttgctaagttcttgaaaaagagtgaggaacacatctcttcatatattcacttactacagatgaagtacctagtcagtatttttctaggagctgtggatacaacaatgatctagaaggtgtcatatttggcctctctcagggagaaagacagacaacaaaaataacatcttatttgaaggccctatagccatttttctttgttggcattcttctcatagcattcttgctagctgatttgctttttaaaaatgaccttgtctttcttataggatcacgtccaaattgtaaagatgttaaggaagaagtaattaaaatgagatttgaaagatcagttagtcaaggaagaagagaaaagagtattcaaggagaggaaacaaccagtaggaaggcaaaagagcacaggcctgttttaagagagaaaagttcaatacagcaagtctgtattcagttttgatggtaggagggtgtttgactaatggttgtgaatgtgcttggagaattaagtctagcttgtgaagggccttatgagccatgctaacatgaaaactggaacataacaataacagtggcaagagtagagctgttgtattagtctattctcatgttactatatggacatatccaagactgggtaatttataaagcaaaggggtttaattgactcacacttccgcatgactggggaggcctcaggaaacttacaatcatggggaaggggaagcaaacacgttcttcttcacatggcggcaggagacagaagtgctgagcaaagggggaaaagccccttatagaaccctcagatctcatgagaattcactcattaccacgagaacggcatgcgagtaactgcccccaaaatttaattacctcccactgggtccctcccacaacacatggggattatgggaactacaattcaagatgagatttggttgaggacacagccaaaccatatcagctgtgtttcaaaatgatattcgtagaatgaaaaatagataataaaagtcgagaatggaaacagggacactaattgggaggctgctatggtaactgatgtgaggaaaggaatggtctccaaaaagatatgtccatgttctaattccctgaaccatatttggaaagggtctttgcaggtgtaattacattgagggtcttgaggtgtagggttcatactggattacctgggtcagccctaaatacaacgatgagtatttttataagggacacacaggggcgatgtgacagacagaaaaagagaaggccatgtgactgtagaggcagagatttcagcatgagctgaggaatgttgacagcaccagaaactgggagaggtaaggaaggtttttcctctagggattccagagggagtatggctctgctgacacactgttttcagacttctggtccccagaacgtcaagagaataaatttctgttgtttttagttaaaattttttggtaatttgttatggcagccacaggtaactaacatagcaaggcaaaagcaaaacacaggcagatgaaaaggagaaaacctggtgcatttgggtcactgtacaagtccagtagtgcaggacctaacaatatctgtgagtgagaagctggaaatgaggttggacagataagcaggaggttatgtttgtgaaaggctgctgggtctgattgcacatgaaatgccagaagatcagtgagtggatcagactggctggaagaggattacatttttgagcagtggaaaggaaaactggaaagggaaagggaggagcaatgaacagaacacatttttgttttttttttttttttcagagaaggggtctatggtagtgcagggagagaactggaaagggcttgattggggaaatttataccctacccaaaatagggcaatgtcttagttgccttgggctgctatgacaaataccacaggctaggtgattcaaacaatagaaatttatttctcatagttctggaggctgggaagtccaagatcaaggtgctggcaaatttggttcttggtgaggacctactttctggccaccatcttgctgtgtcttcacattgcagagagaagaacctttggtggttcttcctctttttataaggatcctaatcccatcatggtgggggatccaccctcctaacctcatctaaacctaattctctgttaaaggccccaccatcctaatgccatcatgttggggatatgggctgcaatatataaattttatggtggcacaaacattcagtccataacaggcaagaaattaaactatccatgcatcagatgtgggccacataggaaagagggtcagcctggagctcttctaggtcctgagagtaccacctggaagggcaatgggccacaataggagagtctgagtctttgtggagcggatgatggaaggccaggaagtggtgcaaggaggaagggaaagcagacacttgtagcagatgccagcaaggcttccaggccagcaggggagaggctgtgtctaagtactggaggctgctattagagaggcccagtggcttaggacagtacttatcaggagctgaacaagaactttcctctttttctctctccccaacaacagctctcacactggtgggcctgcactgggggtggggaggacttctgggtgggaaatgagtgggaagacagagcaattggccacacccctctccccaagggcaggtgacccactgactgctggcctcagctggaagatggggataagccttgcatgaagtctaagatgtttactgacatcttagattagacatttaaaatttctgaattagagtgttttgagacatagaagacttgaggactcagccatcagagtagaaagtttcctataaaacagtagtgggacagagttgtgttttgcttatctattaagcatcatacttgtaccatgtaccatttagattttcaaagaaaaggatggacatttcatccaggaaatcctagtgagtgacttatttccttagaataaaatcagtaaggccgggcgcagtgacttacgcctgtaatcccagcactttgggaggccaaggcaggcagatcatgaagtcaggagatcgagaccatcctggccaacatggtgaaaccccatctctactaaaaatacaaaaattagctgggcgtggtggcacatgcctgcaatcctagctactcgggaggctgaagcaggagaatcgcttgaaccgggagttggaggttgcagtgagccgagattgcaccactgcactccagcctggtgacagagtgagacttcgtctaaataaataaacaaataaaatcagcaagatggaaaaggcctgttctgaatagatgcttccctatttctctagtgctaaatttaagatagacaaatcatgttgtgcaatgtatttggttaatgttatcacttctaattcttacaggttttatacagaaatttctaaagcatcacattcacattccatttgttttccctagccaagagaggtctgtaacatggtaaacacaaaagactcagaactgaaaactggaattgaaaagacttttctattctgttcacaaggaccttcttttcccccttggttcaccacttaatcttttggtctctttttcttcatctgtacagtggagataatgggtcccaatttcattttatgttatctcgatggaaggattcccacagttagactgaatgaaaacctgacaagtaatacccacttatctacctctctgaagtgctgtaagaattaatgacagcctgcaaagtgcactgacgatgaagaacacgccatgagagaaagagaggtgatgagtattattaaaagtgtcaaaggataagtatatcttaatgaatgtggataaacacatacaccaaaggatcttggcttgcttgccctagtgcctcaatgccttagggtaaaaagaaatatgaataatatctgagtagaaaaataaaagcagtaaaaaaaatctctccatccaggacattagtagtgaaatcatttttacatcctaaaatatttcattctaaattttaaaaataaagcactgatttatgcaccccaaatctaatgaaatcaagcagtatgtcttggaaatttagaacagtctatgtaggaaggcaaagtactaaagacaaagatgttcagaaattgagtcaagccaaacagatcaaagatactctgctccccaatgcaaaaggcatcacgggcagaatttatttgctatgtatagaattgagaactgctttttttttttttttttgatcttgcaaaggagatgaaatggatatgtgaatgttgcttgattaggaggacactctgggagcgggcaaaaatgcacagcaaatttgacaggaagagtaactaataattactttggttagttacatttacaaaacaataagagaagaataagtcacttatgaagttaaataaatttaaagaaaattagggtagttgtttccttcctgtacacaaattatttcaggctatgaactctccagcaagtaaataaaaaattattttggcttttacaatttatcttggtcttgatgcacacaagggcaagatatgacagtgtctatttcttctagaggactccgatttgttgtatatataagcaggtgtcctcataagtctcattatatactatgtttacctccacatatattttctgtttcctattgtttgtttctatgttgtaatatgccagtgagctataggtaatgttggagaagagattttttaaaaaatctcttatctttcataccatatgtgaaacaggtggtagtctgctctcatagatgaatatttctgtgatgaattttttctttttatttcttatttacataagctaatttatttttgccaaagtgtttacattctgccctatagatgtggtctgagtgtatttgctgtagtcaaaagtctctgttttatacttgattttggagttaggtgggacaaggaaaatgcaagtagatggaactcatggtggccttaatgttatcatttcttttttaaacagggctcaattttagagctgtgctgtagtccacaaaacaatcagtctctatgacaataattctaattttggtagaataattttaacaccactaaaagcacttggagagacttcatttatgtaggacattagtgagataatttggaacctgttcctgagtgcgggacatacttgcaaatatttaaatgctgacttctttagtcacttgtttcactttttaaaaaaagaaaatagtaatttgaggtatatgatcaaaattaaataaaaactctacttaaacagtatattactgagtattatattttcttggtaaaaaattaaagtattgtgaaacaaatattgaataaataactaaaaatcccatatttaataaattaattatagagcgaaaattttcctttgaaatcctctcttcaacacactataatattcgtatgtgtgtgaaattcttccctattccaaatttaccatctcatttctgttcacttttgtgtccacagagtatctgcctggaaaccctgttgcctggagaccactcttgaagaacatccactgctgtggcctcttaaagatttaagacatctaatgaacagctgacagaaatcatcaatttgctcctcagtaagtaatatttttaagtcacaataaaacacttatctggatattatttattcagataatcataacagctcaagtataggatgcaaaggggaaaaatacctttgaaaaatttgaattgtacaaatccatacaaaagagagatgggacaaaaaataaaatctgcattttcttcatggaagacgctgtcgagtcctcctattaattatttattcagattttaaaaactattcaaaaaggctttacgtatattttgaactctattatgtattatcgttctctgtggcccaaaggaattttgaagcagaaattcaataaatggcataaggatactggaatagtggatgagaggagacatgatgcagccaaaagaattccatctcaacttgaggcattctggagagggttcaagaatccagcatatcttaacagtgtccaagtatctcacgatatgatggcagaatttgtcaccagtaacagacaccaagtacaaattattattattttattttactctttgtgatgtatttatttatttatttatttatttttgaatcagagtcttgccttgtcacatttatttatttttgagacagagtcttgccctgtcacccaggctggagcgcagtggtgccatcttggctcactgcaacctctgcctcccgggttcaagcgattctcctgcctcagcctcctgagtagctgggattacaggcgcgtaccaccacgcctggctaattttttgtatctttagtagagatggggtttaaccatattggctaggctgtaatttttattattttaaaaaattatttaaaaattttttgtgagtacatagtaggtgtatatatttatggagtacatgaggtgttttgatacacgcatgcaatgtgaaataagtacatcatgaagaatgaagtatccatcccctcaagcatttatcctttcagttacaaataatccaattacattctttaagttattttaaaatgtacaattaagttattattgactatagtcaccgtattgtgctatcaaatagtaggtcttattcattctttctattgttttgtaccctttaaccatcctcacctccatccgattccctgactacccttcccagcctctggtaaccacccttctactccctatgtccgtgagttgaattgatttgatttttagatcccacaaaaagtgagaacatgcaatgtttgtctttctgtgcctggcttatttcactgaacataatgatctccagttccatccatgtccccgaatacaaattaatacatggtagaatctgtgctctgtttaagaagttaggaacatattcaggctatattttgcatttttgaaagatggttaaaatattttaaaaatgtttatgctgaaaggaaaaagttctgtgaactagaaaatttacatgaattaaaacatagctcagagatgaaatctgaaagaaaacatggcccctctttgctaaacttcatagttttgatgctgttaattacactttgttttccatatgatgcctcatggtgaccaaagtaaggtaaattattttgaattaatattccctccaaaaattgttatccccaagcatgtaaaaagtaaaaagcaataaaagcccaagttgcaaagaaagatgtgcttctataagagcatttggaggctgccggaagatggtgcattccagagagcttaagactgagctttgataacagacagacccaaatttctgccacatttcacagtgtgactgtgcattggctgctcaaccttgctaagctttaatatttttgtgtaagaaaaatatatgtatttattgtacctaaaggttgttaagagaattaaatgagtgtgtgtacataaccagagtgcctggaacattaaatgcttaatgcacattagctattacccttatcattattatcaagttaaattaagccaatataatcataaagttggaagctgagtttatgagggcagtggcaaagccacctagctaatcatgagctgctgtttaacaaaatgaaaggaagttattgtttacataacaccatacaaagaggacattttggagaaactaggttaatacatattttaaaaaaaaaggtttttaatgcttttcgtaagcgcgagagaagaaattgagataacgttgcattaaggaactatttagtcttgggagatacataaaatcaaagtactgccccactttgaccctttctctgctttgttaatcctttattgagatataattcacagcagtacaatatatacatattaaatatgctgcatgatgaattttatgcttttatgtatatgcccatggaaccatgaccacaccaacatatagcatgcatccgtcatctcaataggcccattgtgcccattacagtcaatcgaccacccatttcccaaaggttcagatgataggaaggttcagatttccctctccatctagaaaaggggcccttgggaaatttgaagtcctctttcttttccctagctagactttaattctcacccattaattttactttaattctaggtcaccacgcctctagcctacagtcatgctcccatcgaaatgcccctgcttaatttatctgcattgtgacgttcttctgacattgagggggctttctcttagctataatgtcaatgaggtttcactgcacttttggattcacgaatcccataaatactgttatttttgactgtcattgtattgtgttttacaaggcatcctgggccaaggctgagtaaggagacagaggagctttaaggagacatggaggtgaactctaggggcagctacactctcaaactcaactttcctgaagaaggttttctggttctagtttcagtgtcaaatcatgatgcaacagcagagtgaactcagtgtttttggtatgaagatctccatgtgtttccatcatcagcatctcctgtgctcttaatcttaccctggacacctgacccaggtgcccattctgtgaattctttcattgtaggaaagagaaacaggtacaaaagatgcatggtcctcccatggctaaggttcctagccaatctaggtgggtgcccacttgctaaaatgaccctgacccctcatttggtcacttgaccactggtaactctacaagcaaagaagcccttagtgaccagaaacacaggatcctgggtttaaaaagctgatcacagagaaagtagaaaaatccataatatcatccttttcacagcagtacttataagctttgagtttgtatttttccactcactgcatgaaaataccaatagtgtaataatgcaacttcaaaaaaatcaaagagtagctgtgaaagccctcagcccacaggttgctgtgatttgcacttgagtatgctcaagggttcattttattttcgactttaaaattcacactcaattttgacacatgagacatatgtctcagctccttacagtaccaatcctgtaaaaacagatgactcagccaccagttacaacagcatattattgcagtattcaacaaaacatgccttatgctgactagagagaggtttcaagttgatgaggcaaaaacagcaatgtcccatctcagaacatatgctatactatagtaaggaaaaaagagccaaatataaacactaaacaatgttgcattgctgaaatgtaatccctttaaaacattagatgtctttacatttctcattattctattattaattttagaatatgttctctttaatgcaatctatctttacacaaatttaaaaattcagatttctagaagaaccaacaaaccaggggctgatttttctcaatggatttctcctttatactcatagcatctgatgaggtcagcattaagaagcaaggcaattatttaatagcaatggctgtgagccaaagaagaattacaaagataaatcaatctggggtgataaaatgccaaaaaacaggcagccacctcaagtaagaacaagttcgatattaaaatactgttttattttcaagttacccaacaaactgctgaaagaaattacattttccctcatgaaggaaatgacaataaatgccattttctacccattgggcatcacaggatgggtgttgagatacagatatgacatcctcccaattatggtaatactgggcattggagccagaatggtatttagaggtattaattcattcaacacatatgaacacctattatgtatgtgcctttgttttggggatgtgacatacagagagttttcttgtggagatgacagatgtaagctcatagtcacctttgaaataaagttacctatgagggatcctgaaggtgagatcaaggaagactataaatgagacaatgtataaacagaggctgaaagcaagagaaagttgccagttagagaaggcaagaaaatatcccatgagagggcatggcatttgcagtcacagatgtgtgaaatagcttaggatgcttggaaaacaacaagcggctttgtgtggctgcagcaaatgttgcaatccataagcagcaagagttgctcctaaaaatgcaggcaggaactggatcatgaggggtctttaggcccaaagagtttagcacattcttgcagaaaggagagtgacacaaccagaaggccagagagacccgtggggtttgttctagcaattcacatgaaagggaataaggactagatttgaggttgggttggattgtgggaaagctgaatttgagggggtaggtaaaagaaaaaacttttagaaatggttaccaatctttgcggtttctgacttaagctattgtggtaatgggggctttctgaatggagtaaaggaatacagtgggcacaaattctggaataggtagttaggaatgaagaatgattttactttttggagatgctgtcgtttgggtactgaggtggaaatgacaaagtaaatagtttgtaagatcaatgcattcattctatcatcacttaggacactccaagtgatggtttcatatgctatggaattatatccaactatttttgatgatttactatggagattctggagaataaagatccttgcaaggatctatttgataactttatggcaagtgtttcaaatcagaggattgcagcttaaggtattaggaaacttagatagaagcttgattatcatcagtataatgtgcattgtgaactaagaccacgagcattggtttagtgaggattagcccatgcctcaaaataacacatgatcgaatacacattatattgcaacactctccattgtaaataactgttcaatgccataaatctgcttttagaaaacagtcctctaaaaatagaaatcaaaccatattgctacactgcatcacactcaaaggcttctcatttcactcagagtaaaaggcaaagtccttacaatagcctacaaacccctccatgatatgccttgttctccttgtctctctaacctcattgctctttacactcctccctctcagtcactgtattcagctatactgacctctttgctgctcctaaaacatcaaatgctcgacaattccctttttcctagaatgtatttcttgcagatatctgtatgctgttaagtcattggtcaaatgttacattttacgtgagttctttcttgaccactgagttaaaattgtggcacctaagccttaataacttcctatccctttttactattttattttctccatagaaccaaagaccagtttttgtacttcctttaacatcttaactggagatgatatattaggagataataatggtataatgctgatagcagctgtagaaaggatgtggattagttttgttagaataagctgagcttatgctgcagtgacaactggccctcagatctcagtggctttactgaaaaagtttatttcttcctcagtcaaagcctgcttaagtcagatgactctccagggtagctctcctctatgcagtgactcagtgatccaggatttttcatcctatagctccaccatctcaatctatggcttccatgtttgctaccgaggatctcacgaaggcttttatccaactcgttccagaagtgacacacctcattcctgctcatagcctattggtcagagctagtaccatgatctcacccaactgggggttaaggctgactgggaagtatgatgttctaagtgctctggaaggagaggagacttggctattggtgagcactcctcaggtttacacagcaaccaactctggaatgatcttcttaagatgcagtgtgatgcaatgtagggagcacagaacaggattcagcagggctggatgtaagatctcattgaactaatcactattcacatggcttcaatttaggtatccgctctggaactctattttcaaactcatgagatcggggaaaatacttatcctgcttatatcagaaaggtttgtaagtcccaaatataaaagtttgtaaacagaatttccaaatgtaggcaaccgttcaaatgccagtacatgaataatgcagtatggagcataggaaacctgcccagataagataaaatgaattacattcctattttacatcaatatttataaagttatctcattgttagagccatagagaatgctatcatttccagacctgctggcttaacagctgtgatacctagccagtgaggtagggagctgtttatgtatcagcactggtttattttgtatgtatggagcatgaagaaaatgccaaggaaattcagatgtataacaaacacttaagattaccgaaagcaaaattcattcaacagtgaatgaatccaatactggcagcttgtgtggtatcttctgttctgttgctggaggacattggctattgtgcaatgtagtctattgttgcaaggattcatgtgtatttagcacaaggtatgatactgacaaaatatcagctatttgaaaagtctcattagaatgtatttaaggatatattaaaatcttttgataatattagattttatagatttgagtactaagtacatttgttgtcagacttcaaaaagatattgaatttatatataataattttgttagtcacttcaagtttgttgaggatggtaaaatattagcattaataatgatatcctatttgtcagtgttatctattcaaagaagtattataaataacaaatctaaacttttaaatacatttaatacaaaatagtcaaatatgtggatttctctattattttactagtgatttgggtcttctggaattcctcagcagacttttacaacattagggtagaaggaatccaaattatctgtttcaattccttgccaaatgaacacattatccctatggggaacttcttgctaactgacgttattgtagcatgccatttattatctgtgagaaagtttaccctttgtgtgtatccatatgtgatagagaagtatttcacatagtaaacagatatttgcctcagtagacacttcacccattattttagattggagatgtttcttgccactggtatctgtgttatacacacatactaaatattagtaacatctttacagttcatttaaaaatagtagattcagagactaaactattaaagatgataaaccagttagtacttgggtaaccaacacataaaaacctagatgataattttctaatcgaatcttgtcatggaattttcctgcctagtcattggctcacatagttctactgtgatgaacaaaagaagatggatccaataagatcagacacaaatagatgcccatagtcatatgctggaatgcagacagcatatcaacaatgagataaagctttgtacaacagaagttcactgaatcgatattctgaaacattcccaagtgctggcttttaaaatggagggtaacagaaagcacaatgaattttataagatgttttatatgatgttgtgataaaagaggagcaagtgattgcaaagtgaaggcttctttgttttatttcttgaaaatttatactactgcctccactcaagggtttgagtttcttcccctttaaccccaaagattataaccttgagaatgattgctttcctccttttattcttttaagacacttctgccattcacttttataaaagacatccagagagctggtcatggtgccaagttgatgatacattgtgtagacaatttagaggaaaaagtatagaaaaataggtgtattcaaatagaaggcctagttcaaatgtcactttctacatggcagttcagaaatatgtcaacaatatcacacatacacacacacacacacacacacacactctgcttgaagtacggcagtaccatcagaatgggattcccttttcacatctctttttcctctcgtctatttcttatacagacaaaactgcatcatgctggtctttaataaacagcatcaatggatttccaccatggtccatgtgtcttacaacttaggagtatcgttcacattcagtccctctttttttatttatttttttttgagacagagtctcactctgtcactcaggctggagtgcaatggtgcgatcttggctcactgcaacctccgtctccagggtccaagcgattctcctgcctcggcctcccaagtagctgggattacaggcgcatgccaccatgcctggctaatttttttttgtatttttagtagaaacggggttccactatgttggcctggctgatcttgaacccctcatctcaagtgatccacctgccttggcccccaaagtgctgggatcacagcgtgagccaccgcgcccggcccacagagtctttatcaggtgtcagcacgctacatcctaggggccagatctggtctgctgcctgtttctgtatgacctgttagctaagaacattctgtttttacattcttaagtggcttaaaaagtgagaagagtaacattttgtgaaattcaaatttcagtgtctataaataaaattttattgggacacatccaaattcatgtgtttacgcattgtctataactttttctgagctccaaaggcagagttgagtagttacaacatagaccacgtggcctgcaaagcctaaaatatttactatcaggctagataaaacagaaaaggttgaccaacccctaatgcatatgaatgggacccctggagttggctgtgcataacctgtgtggctgtatactatagccctggtctcaaatagtcatcaaagtaagtgcttttctcctagccaagcgtttaacatttttcacaatctggatgcagaccagattctctccagctcgcccacctactacatattcttcccttgttatcatttacctacctctgtgtctttgttcacgttgcttccctgtcctagccatgtcttttcatttatctgtctgttgatatctatcactgaaagcctagctcaaatgttgctttcaccatggcagttcaacaatgtgattgaaatcttgcttctgtgaattcacagggtgctttgtacttccctaacacacttaccatattctgccttgtacgatccttagtcttgcactcatttcatattgcctactatcttatatgatctttaagtctaagaactgggcttgctcatctttgtacctctaagaatgctgcagacatgggcaggcctggcacagatccctggaggctgagactaggactaggagccatgccaaccctcaatacacacacagtcacttccttagttgcagggtccaggggaaattccagtggtgtggcaaaagatccaagttagtgctcccataaagctgctgtggggagaggtggcttagttccataaaaagcaaggtttttgaaagacacaaacccaggacccaatccagaagtaggcaatactgtggagactagtcaaaccctatcagtgaagttcattagtagcaaaaacctattgaccagaccaagttccagggcagcacagccagtaagaaaaggggataaagtgggagttgtggagtttagcaaggagaggacagaggcttggtcttagaaagatcagggctctaaaagggcgactggggcaaaagtccaaagaggaaaaaaccatgcatgctcagcaaactattgcaaggacaaaaaaccaaacaccgcatgttctcactcataggtgggaattgaacaatgagaacacatggacacaggaaggggactatcacacaccggggactgttgtggggtggggggaggggggagggataccattaggagatatacctaatgtaaatgacgagttaatgggtgcagcacaccaacatggcacatgtatacatatgtaacaaacctgcacgttgtgcacatgtaccctaaaacttgaagtataataataaaaaaaaaaaccatgcccaaggtaagaaagaaactactatagagaggatgacctgagctgagtcccagacgttgggtgggggctccagaaattactcttgcttatgtttagatgtaatcctagggtcttcagaatagagaaagttattgctctaatttggtttgacccccctccaaatctcatgttgaaatttgatccccagtgttggaagtggagcctaatgggaggtgttttggttgtgggggaagatggttcatgaatgccttggtactcgtggtaatgagtttttactctgttagttctcccaagacctggttgtcaaaaagagcctcacacctcccctgctcttgcttcctctatcaccatgtgatctctgtagataccagctcccttctgccttccactgtaaatggaggcagtcagaggccctcatcagaagcagatgctgctgtcatgcttcttttattgcctgcagaaccatgagccaaataaacctattttctttataaattactcggcctcagctattcctttagagcaacacaaaagtggccctagtttcctagtgcagggagacagtagactacaggaagagaaagagtgtataaaaagggccagagtcagagggaactaacttattttgagcactaaccatatgtcaggccatgtaataaggcttttattcacagtatctcacttaatgtgcacagtaactctgcaaggaagcagcattatgcccatttaacagatgagaaaattgaggcttagactaagcaattgacggacatgagatctgaaggcaggcctaagtgaacccaaaccaattccttcacatgtttcccaccgctatatcatacttcttcaataaatatttattaagtgaataatgaagatagaaaaattataactggacatgcttttcacgattcaatgtggtatgcatgatagtactatcttttctccccatgttttctcttgtaagttaaagagcttttgtctcttttatcactggttcagtgaattaataactcatgcatactctgtgtcctatgtgccaacaggcacgttaagtaatctaagaacatactagttgccctagggaattgctttggatctctggccttcaatgccttccacaaactagtccaaacttcctttccaggcttattttattttgttcagccctcttaggccacttactgttttccagtcaactcctgtacaccttgtctcctccatattacatgttactctttcagtaaaatccaccctgatctctttttctttttcttttcttttctttttttttgggagagagtctcactttgtcgcccaaggctggagtgcagttgcacaatcttggctcactgcagcctcaaccactggcgttcaagtgatcctcctgcctcagctccccaggtagctggaaactatagtcacataccatcatgcccggctaattttttgtactttttgtagagatggggttttgtcatgttgcccaggctggtcctgaactcctgagttcaagtgatccacccatgtcagcctccctgatgtctttattcagaactgctctctttctccccaactcatggagcattgatatggttctatgcttgatctgaaataatactaaaaactccaataactatactataaatctccaaaagagtttgcacttatcctttttctcccacaatgcttatactgtcattcacacaaaagacatgcttaaaatatgttttaagtactaaaaaaaggcataagtgaaatttcactttcttaggctctttcatatgggcaatttttccctcagaagtttgtttccacactagccctccccaccttttttgacttgattctttccagtcaatgcaattctttctggtccctgaaattctatagaatgaagcagttgtatgaaatgtaagaagttggcgtatttaaggtagactatggctctttgctttataccacttgcaaagccaatgttgagtacctgagtctaaaaatacttttcactgccaatcacatgtacagactaggttatttggtgtataatctgattaccagtatttaatgaaaaatactgattgcatcctaggatcacacatccttccaagaagttctatttaaatcactctgtaatttctcttactatgtaatttgcattgtgacagtttgatagtttataagggccctttgaaagccaacttgaactgtagggcaaaatgtatttagcacatttttaaagcacattaaaaaagacttgtcatttgataaatattaatgcatttattaatagatgaccaatggctgctaaatgatgacaaaagtttgagatttcagtgactacaagcaaatccattgctattgaagttaaaaatctgaaatgcattcttctgaaagttgcactctaaaaatattgattgcagaatatcaagctgaacgattctgttacatgacaagttctctagttttgatgagtttatagagatctcccaaaatataatcaatttttaattgtctgtttaaataggcaatagtatctgtacatattatgtatgataatggtcaaactcagattcacttgtattggcctctggaatgtttgatatattttaaggaatgtgtgataattgatttgcttcaaaatcctttgcttaactgaatattaacattcagctataagctagcaagtaatgaaaggattctagggaataataaaagcaatgtttagccaggatttaagaattcactgggggccgggcgcggtggctcacgcctgtaatcccagcactttgggaggccgaggcgggcggatcacgaggtcaggagatcgagaccatcctggctaacacggtgaaaccccgtctctactaaaaatacaaaaaattagccgggcgtggtagcgggcgcctgtagtcccagctactcgggaggctgaggcaggagaatggcgtgaacccgggaggcggagcttgcagtgagccgagatcgcgccactgcactccagcctgggcgacagagcgagactccgtctcaaaaaaaaaaaaaaaaaaaaaaaaaaaaaagaattcactgggataatctatcaaattataattttgactataatcaaggttaaaaataaggtacctatcaataaaatgagttattgtgaaagaaatagggcagctctatagtaggattagtcaagcctgtccttctgcaatccattgtttacttcatattattagacagttttaatatggtattacttctaatctttcaagtatcttgtcagataaatctaattatttctgagaagtggcttgcaactgaaagaaaaatgtagcagaaaaacttatttgtctatctagctatatttagtttgaaaaaaataattcctcctttttcttctatctaaaagaagactcagatggggaatggggtatattaaaacttcctggaatggggaggagaattccaaaattcaagagagcccagacagttcttttttggagacagagtcttgctttgttgtccaggctggagtgcagtggcatggtcttggctcactgcaacctccatctcccggattcaagtgattttcctgcctcagcctcccgagtagctgggattacaggcacacaccactatgcctggctaatttttgtatttttagtagagacagggtttcaccatgctgcccagcctggtctcgaactcatgagttcaggctatcctcccacctcggcttcccaaagtgctaggattacagacgtgagtcaccgtgcccagccccagacaattctttattaaacctgtaagagatgccagaagatttccacacaagaacatacaggtatttcttgggggacctcagcacttgtctgtgacttgaaggcttatcagtattcctctcacctgaccctgaggtcttggcccacaataacaacgaacctttgtttctcagcactcacactgattgactgaacacagccatgttgaacaggttggattgttaagaaaggagtgatttcaaacttgggtgtgatcactccctgaggatttgggaaggcaatgcagagacagtgtcttggttatgaaagtagaaatcagccgctatgtgaatgtgaccaccagaaattccaaacttagaccactgacattggttgtctgagacactaacatcttttttgccctgtgttctggtttgaacgtctgttccacaactcatgttgaaatttaattggcaatgtaatggtattgggaggttggggctttaagagatgaggaggtcatgaatgtcctgccctgataaatgaattaaagttattatcccaggtgtggattagttattgcagtggtgagctcttgataaaaggatgagtttgacccgatttctctctctgtctcctgtgctcacttctgcctcctgccttctgccttgggatgacccttgccagatgttgacaccatgctcttggacttcccagcttccagaatcatgagccaaataaacctcttttctttataaattacccagtctgttgtattctgtcatagctgcagcagacagactaagacactgctgctttaatctcctcatttgtgaaatgcagaaatcatgctacttttattgatggcagctccatcatttatgatgctgcctgaccaatatcatcctaaaactcagccttctgacacttaacaaatgcttcaataaattttgatcccagttctttaacaattgactacctcaagaaaaggatggggctcaggatcagggtatcacaatgagttctgaaattaggcagtaatttacatttttggagtatcactggaatccgtacaacttttttcctgaagtagaatagctttgggtaaaccatccttgctccttcactcaggcctgtttgtgatccactgcaaacaatttaatatagttcctaaggttagaggtggtttttggaagatagttccaagtcttatacatttttgtatccctagaatgaattaataagaaaatcttaggctgtatagccaatctattcattcatttgattcaacaaatatttattgagagcttactatgtgccaaatactatttcagatgtttggaatatatcattaagtaagataactgtcctacaagagattacatcctggaggggcgggggaacaggcaatgcacataataaataagtataaatattgtcagaagctataaaattgtacaaagtataaaagaatgagtcagccaggatcaggggaagggatgtagaagaactgggaaacaaagacttgaaagtggtgaaggagttggccaaagagacatctgggtaacagcataccagacagatggcacagctaggagagggacctgaagggaatctgacatactcaagcagtgaagtcaatgtggctgaaggaaagtgcatatgggaaaaatggcaggacatgaggtcagaggttaaggggccaggtcgtggagtaacttgtaggccatttaagactttggctcttactctgtgtgaaaaagggaaagtactgaagcgttttgagcagagcagtggcataatcctatctcaggtttttgaaagaaataaccctggttgctgggctgagaacagactatctaaattgagaataaagtagagatattaaaaagaaacaacagatgctggtgaggctgtagagaaataagaatgcttttacactgttggtggggatgtaaattagttcaaccattgtggaagatagcatggtgattcctcaaggatctagaaccaaggatcatttcacccagcaatcccattactaggtatatacccaaagtaatataaatcattctgttataaagatacatgctcttgtatgttcattgcagcactattcacaatagcaaagacatggaatcaacccaaatgtccatcaatgacggattggaaaaagaaaatgtggtatatatacaccatggaatactatgaagccataaaaaggaatgaaatcatgccttctttttctttatttcttcttctaaaaaaaaacccaggagatatatatatatatatatatatatatatgcagaaagtgcaggtttattacacaggtatccgtgtgccatggtggtttgctgcacctattgacccatcctctaagttccctcccctcaacccctaccccccaacaggccctggtatgtgttgttcccctctctgtgtccatgagttttcaatgttcaactcctacttataaatgagaacatgtgttgtttggttttctgttcctgtgttagtttcctgatgatgatggcttccagcttcatccatgtccctgcaaaggacatgatctcattcctttttatggctgcatagtattccatggtgtatatgtaccacattttctttatccagcctatcgttgatgggcatttgggttggttccatgtctttgctattgtaaatagtgcttcagtaaacatatgtgtgcatgtgtctttatagtagaatgatttatgttcctttgggtatatacccagtaatgggattgctgggtgaaatggtatttctggttctagatccttgaggaatcaccatactatcttccacaatggttgaacgaatttacattcccaccaacagtgtaaaagctttcctatttctccacagccttgccagcatctattgtttcctgattttttaataatcgccattctgactggcatgagatggtatctccttgtggttttgatttctgtttctctgatgatcagtgatgttgagctttatgcaaccaacaaacatatgagatcatgtcttttgcagggacatggatcgacctggaagccattatcctcagcaaactgatgcaggaacagaaaaccaaacactgcgcgttctcacttgtaagtgggacctgaacaatgagaacacatgaacacaaggaggggaacaacacatactgggtcccgtcagggggtgcggagggagggagagcatcacgataaatagctaatgcatgcggggcttactacctaggtgatgggttgataggttcagcaaaccaccatggtacatgtttacctgtttatctatgtaacaaacctgcacatcctgcacatgtatcttggaacttaaaataaaataaaattaaaaacttttaaaagagaataaagtagggagatgaattaagaggcactaatccaggtgaaacagttttaagagattaaatcagcatccttggtttccccatcaaataacccatcatgctaaccagcccagactgatattgctttacatgtatacgaaagacatctggttaaatcaaatagcactgccaatcaattttcacctagagatatgctcaggtattttcttagttcttacattttgtaaataggtggtatgctgaatggacatcaaattcaataacaaattcccataagaaacatcaggactaatttatccaaaaggaacattcaaattaacatcaatcagcaatagcaaataatgacctactttatcttgtactgatcttgactaaggaaagaattcatgatgcactgctacctctattgaactcttgagtatatctcattccaaagagaatggtgagcaaaacattgtttcatttgggtcatggatacatgctgtatattccagtccacccacccataggttactcatgacagggcctctagatagaggcaggacaattatatatcaaagaagaaaatatgaaaagacagataaaatatttgctgatgttttataaagaaaattcagtgcacttctttatcagtcaaaggtagtattttcaatgtttttctctttgttttggagccgtactgtctcctttgtagctgttctgtccttcaagaaaggacctgtggtggtatggattgaaaagttgactctgtcatcaccttacaaatgaattctatctgaagtgaaaagtcaccaacagttttacattgatgttgtgttgttccatgtggtattctgtcaaaactacgtgccttcttgaacaaagatttcacctttatttttaagcacatttcaaccaaccacagtatcagacacttccactaggaggttaatgaaaattggcaatatggacaatattcccactgtagagaagatttaccatatattttttagaagtttacagaaggtaccttgacctagtcttgatctactccataaatgggtttaagtggacttgaaagtccctaaaattattcgcaaagttgtgaatctgttatatgatccagtagcttttatcagaacttcaaaggcatctgtaatggcacttcccctcaaaaattttttaaaaaaactttaaaacaacactgacatagaaatatgcaaagatggtatttttaagggttatttatatttagggagaatgctctcccaaattatagacagtttgcttgcaaaatttagttctgttttgattaaaatggactttttgctttcacatcttacatttccagagaaaatattttattttaccaattataatgttccatagtaggataaaccttaatttatttcaaccacatttatgagcactcactctacactggaggatatgatgatgccacaaagataaaacaccacgttcctgcccttgaaaatctacagtctatcaggagagatggagacacagctgatgatcatatacagtgaaaaaacccaacgaaggaaatgaattcaagggcagttttgttctcgggataattgaattctgccagaagttattaagactggaaaggtgaatacgtttttccagacacaggaagaaatcaagagtgttctgagcacaacaaacaataggcatgaaagcgtgaatgttcagcttggtgggagcccaggctctgaggaaggcttggctgaagggaagtctggacttcgtcaggaggcaaaggatcttgtgcatgttaggtgatgaggaaatattgaaaatggtaagatagaggaaagatataatctgaattattttcgaagtttaactgtggtgaacgagatgaggacagattgaaagtataataggaagctgccaaaaaaaggcaattttttgaattaataacataatatagttctggcctcttttctagaagttatcctacttttctttgtctaactttgtccttctaatctgtcagcaattactattgatgctacctctaaaacatattctgaatctactcatttgtctttatgcctgtgctgttatctgaggaaatgccccctttctctctctcttgctcccctgagataattccaaagttgtgtctctgcttcttttcttacccctcacaatctgttcaccacatggcagcaagtggccttttaaaataaaataccaatcagatcattccattcccttatttaaaactcccatggctttctgctatgcttaggagtcacatccaacctctgcattgcggtctgccggactctgtgtcatctgacctatgtcaacttctttctgcctactatctcattttctaccactcattcactcagttatgatgctccagccactccagtgttcttcctgttattggaccacctcaaattctttcctgtcctaaatctttggctagaaatactcttctccttcatttctgggaccttttcaggctctagatcaaatgtcaccttctcagagaagcctttgtgaccactcaacctaatgtaggctgcccaaactcatcacaccatcttgccttcagtacattttctgagccacagacaataggcgttactcccctctggagtaatgatcaaaagtagggaagattagagtagatgggcatgtggcccaattccaccaactggaactgggactatttccccataagaacaaagtaaaaattcagagttttgataaatttgtggctcaatgaatgagcttttgtgagacagttagcatcctggccaccagagattacataatttccatcagaaaaatatgttctaaggtccaggtttaccattaagacaaatatattcatatgtgtatatatttcatttgtaggttaagggtggcctatacttgctacatttaaacatttcatatgccgggggttgttttgcatgttggtattagagctcgaaccatgtaggtatatgtatttagatatttgtacttcttattccttaactattttatttctcaaaatatatgtttgctctgacattaaatgcaatcctatatcattaaaaagtgcttactctcatcttaaatcaactaggctaaccaaatttgctactcttgaatttaatccaacaatttcaaacattgttggattaaattgcttacattgaatgttttggccgctccaatcaaagttgatgttgtggaaagcaggaaaatatatttggcctgtatgtctgaaatcctaattctctttcctcagcaacaaactgtacaagacatttaaaaacaaattaccttgtggtagagaaataaaggcttagccttgctttaggcagttttgttggattcagatggctggaagctgaacatgcttggtcatcaacctggaagccaaccacttagtaatgtcttgcccttctctctctgtgtaattgactttttaaaaaattttgttaatttaacatttttgtgtacacatataaaagatcacttagcaaataaccatgtacccattatcaagaataaactgccatgagcattttgtcactttgctccacatattttgtttttttaagaaaataaatgactacaggtaaagacgatgtttgtaatattcccctctacagccttatttccagtgcccttgactgagaaatgtcaatgtcatgctcactttataagagaaatgctgaaaggaatccatctgttctcacagagcatgtattgaagggtgaatttggagctaagaggcaataaattgattactggaatgggagttgtagaacattccctccgtcatcccctttctgatgccctacatgaaatcctcagtaccatcttccaattcattaaatctctctacagatctaattctatgcaattaaaaagatttcagtgccacattatttttactttcagtctttctacttccttttcctcctcctctttcttctcttcccttttatcctacactttttttcatttctgcctatttttcttcattgctctttcaaatttttttcaatgagtttctacctttatgtctttaagaatattaaaaaatattattttgaactaattttcaatggctccattgtattattttattgcagtcatttcatcctcttggatacatgggtgagctgacctcagccccataatagctcaaaggtccaagcagtgagcgtggttccagccctcaaccatgagggcctcccgccttgagctgaggactttggaatttagttcctgctgcccctgccgccttccttccccagaggcttcagcactatcacctttagatttctattcctatttttggcccatgaagatatttatctcatttttgatccctgtaactttataactaaaggatgttattcttaacgtgtgttcaggatatttaataagtaaatttatggcactatgttaaatggaagtttatctgttttctgaaaggatccacttattaaataaaggtgtgctgggctatctgaccccccaaatccctatagtcattgcctacatgtgaatcattttactgtgttaacattatggatggttcccattgaatgaagaattattgctacttattattttttagcttgctgaaagatagttacaggcagttcctaatttactgacatggatggaaccagaagctattatccttagcaaagtagcaaggaacaataaaccaaataccgcatgttctcagttataaatggaagctaaatgatgagaacacatggacacagacaggaacaatggacactgggggccttttggagggtggagggtgtgggagagatcaggaaaaataactaatgggtactaggctcaatacatggatgaggaaataatctgtacaacaaacccccacgacacaagtttacttatgtaacaaacctaaacatgtacccctgagcttaaaagttaagctggagtggtgtctcatgcctgtaatcctagcactttgggaggcaaaggtgggtggaccacttaaggtcaggagttcgaaaccagcctggccaacatggtgaaatcccgtctctactaaaaatacaaaaaatagctgggcgtggtgatgggagcctataatcccagctactcgggaggctgaggcaggagattcgcttgaaactgggaggtggagtttgcagtgagctgagattgtgccactgtactccagcctgggcgacagagcaaaattctggccccaccccccaacaacaacaacaaaaaagttaaaaaaaattaaccattttacaaaagttccattttaaacctcttacttgtaaaatagaagctattccatgttaagattatgacaaccatttgaattattttataaatatgataatttcaaaagtatttaaaataattaacggtttcaaaagaaataatgaatgaattctaatgccgaataaggatttcaggaacacatctttcttccaccttggtatcctgctataatattcagaaaatccaaattccaatcttaggtcaaccaggtattagctaagtgactttgtgaacactgtgtaagcctctttacctctttaacttttgggtaaaagcttttttaagttgtataataatttctgctgttacttcagggttttaggtgtcaaaggaaataaggaaggtgcaagcatttaaacatttgagaaccctacttgggagcacatgatgtgtcctccaaacactatggtcttgttaattgtcaacacctgactcagagcaggcacaagctatgttaagcacttataatgaattagaaaataaagttgaccccaaaggtgaaaaggatctgggcctttttttcttcccaatatgcaagtgtgttcacaacatgagtgatcagaagtcaggggatgctgggctatcccacgtaactctattctgcacgagaaacacatataaaggcatttggacatttggaacaaattagagctacagtaaaggccagaaacactgccagtttccctcttgctttctccccaggccaacatattaccaaaataagtagtctcatcaataaactagggtttggaatttggaattaaccaggcataatttctcaagtattatggcctcttttttaaaggcatgaagttgggtaaaattgataccttttaattctgtaaaatataacccaatttacataaccaaataaagtcaaatcacttttaattttacttattgagtgctgtacaaacctcaaaggttagaaagccaacaaaaaaaatgcagaataggcagctttttatatttttcctgaatttagaaatttttcattatatggacaattattattgaaaatatgtgtttttatcatccagtaaaaatggcttatgttggcatgaatatactccatttcattgctacttttgtacatttcttttattttgcctgaatatggccagatgaatcatatataaagaaagctcagctcctccagaacactgctattgtataaagagtactgctgccaaattcaaagctaaattcaggtttgaggtatcagaatcttttataggtcccgggagaatattttgttcaaataatagtccagtgatttgagggtgtgtgcacctgttgattttctagaaatataatattctgcgaagtcagggataatgaaggctaagccatcattacctttttaaaaatgacaaaggaatgaactgtttcataaaagtgtcatatagaaatttcaaaaataaactacagaaattctataaataaagagtaaaggaaaaaaattcagcaacacttaaaacgagtaaaaatccagagacatcctggtagaaatcttagtccacagtcaatcaaaaagaagcaaatatcactacagaaaaacaattttgacagaatagaaataaaaatattcattgtattccaaaaaataacatcatttttgttaatagctaaatatctttttttagttcaaaaggtttaccttttaaagctttgatttcttttagaaattcctattaaatactattttccagaaatttgttaatgcaactgatatgatttggatatgtgtcccctccaaatctcgtgttgaaatgtgatccttagtgttggaggtgggcctagtgagaggtgtttaggtcatggagcaggtccctcaggaatggcttggtgccactctcatggtaaggagggagttcttgctctggtagttcaagcaagagctggttgtttaaaggagactggctccttcctgctctccctcttttgccccttctctcaccatatgatgtgcctgctcctcaattgccttttgccatgagtggaagcttcctgaggccctcgtcagaaccgggtgccagtgctatgcttcctgtacagcctgtagaaccatgagccaaaataaatttctttccttcataaattacccttcctcaagtctttacagaaatgaaggaatgaactaacacagcaactttgtaaagcacttaaaatgaggggaaaagggaaagtctaagactcagttcaatctattggatggtacaattatttatatatttaaagaggagcaacttcttgatcagaaatcaatttgacctacagttacgggagcttaagtactgattatatgtggccatcagagaagaaaacatgtaagagatggaggaacattcaaaaagatctcttataagccttttcaacagagatttctctggaacaggtgggctaacactacaaaattttgttggtttagtatgtttcatgcaaacacagtccattattagaagcaaacaaagggccacaggtgagattaaaataattactcagtttttccttgtgatgactcttacactgatactttatatatagtacttattagtcacaaccattcagtagatgtgtattaccactgtttcctaacatataatgaaagtgagggtcagaggaggttagtaacttgcctaaggtcactcagtaagtggcatttagaggtggcaatttgaatagaagcatgtctagctcaaagtccattctatgtttatcacattagataatcttacatatgtttcttttgcatcttttttagaatgatatacagagttttatgaaataattgcatttctgataaactggctataaattaccttttataaacagagtcacatattaatatacattggaagcactcactcattcaacaaatgccatgcaatgcatttataaagtaattcatgaagaaaacaggtaaccacaattttatataaatttcaactacaaatgataactcttagctttgcctaaaatggattaaatctgtaccaagtgtgcttttgctggatccagcagcactcattagcatggtttgggaataggtgccctcttgcagacttgcaggctagctgaaccagtagcatagtgcatataaatgcagatcctgaaaacataggggagtgcggtttgcaacagccaagaatgatatcatcagtctctatttcatttaattaaaaattatcagctgtacatagtgctatttttgacacaggtcactgtggttcaatgctattggattttatcttattaagcacttagctgtttgctggaatgatggaggggcagagctgtgtattcacagaggttacagagttagcccttagacctttggtaacattgaatagtttatcctcaaaggctcctttcttgaaaactttatgttatggctacccatcccatcttttctagtgacaatgatgaaatgtgttgaaacattaatatatatcaacggaaatactgacatatgttgacatacataagtgttggtaaacaactctacaactatagtaaataaataaaccattcttctatcagagactagggcaaacctaagctgtatgactttggatattactgtgaagcttagttttgccagacaattttgcttgtatttgtatgttctgaaagccaactgagttgagaaactacttacagaattcaatctgctccagcagcctgaatgattgttttgcccataataaaattattttttattcataaatatatactttttaattttgaagtaatcctaaacttaaagagaaagttgtaagtataatataaataactataaaaatcatttttgtctgcagcattttctgcaaatgttgcctccagttatagtttttcttttaattgttaggattttgttttaaatttagccttaaaatgtgagtttattgggcattttataatattaattttattttttttaattatactttaagttctgggatacatgtgcagaacgtgcaggtttgttacatatgtatacacgtgccatggtggtttgctgcacccatcaacctgtcatctaaatgaggtatttctcttaatgttatccctcccctatcccccaacccctcgacaggccccggtgtgtgatgttcccctccctgtgcccatgtgttctcattgttcaactcccacttatgagtgagaacaggcagtgtttggttttctgttcttgtgttattttgctgagaatgatggtttccagcttcatccatgtgcctgcaaaggacatgaactcatccttttttgtggccacatagtattccatggtgtatatgtgccacattttctttatccagtctatcagagaaattcattgacaagtttgccaaggtcatcactgataaaaatgtgacactaggacaagtctataatgatgatgcaatgtgactgttttagtgttagtggcccagaaagacactgactacagccaatcagacagctcctacaggaattaagaatgccaaagagagaataactgtgctgagaggtgctaatgcagcaggcacgcataagtgtaaacttgctgtaatagtcaaaagcttgcatcctccttgttttcaaggagtaatttttttaaccagtccattattacgctaataaaaagacatggatcaccagggacacctcgtcggattggtttcacaaacattttgcatcagtggctcatgctcaccacagggaagctggattggatggatgactattgcaagattgtgttattccttgacaaccgttcttctcatcccgcggctgaaattcccataaaaataatgtctatgtcatgtactttcccctaaatatgacttatatggtttggctctgtgtccccacccaaatctcatgtcaaactataatccccacgtgttgaaggagaatcctggtgggaggggattgaatccctggacttcctccttgctgttatcatgatagagttttcacgagatctggttgtttaaaagtgcagcatttttcccttcattttctctctcctgctccaacatggggagtcatgcttgcttctccttcactttccactatgactggaagtttcctgaggcctccccagctgtggaactaactcttcctgtacagcctgtggaactcttgagtcaatgaaacctcttttcttcataaattacccagtctcaggtagttctttatagcagtgtgagaacgggctatgacaatgactttattaactcagtcatgtggccagggtatccttagatcgataaagagtaaatataaaaacattttcttgaacagcgtgctagccagcagtgaacagaggtgtgaatgtggaaagttttcaaacctttaaggtttgaaaaaagttcagcatgaagaatgccatacatactgttgccaatgcttgaaacatagtgattaaagtcacagttgtgcatgcctgacacaacctctggcctgcaactaagttcagtgatgatgatgaacaaggtggtgactttgaaggattctgtaatttgaaggattatgtaaagcgagaaaaaaagaatgtctgatttccttacatatgcaaaaaatatatcttcagagttcattagtaagctggaagaggtgaatatcaaagacatttttaatatcaataatgaggctctagttcattcactgatgatgaaatagctgaaatggttctgaatcaaggtgatcatgaaaacagtaacaatgaagatgatgtcaacactgcagaaaaggtgcctatagacaacatggtgaaaatgtgtgatgggcttattgaaggactaaagcagcatgcatttgtaacaggacaggaaatcatgtcagtttataaagtcagtgagaggcttctaagacaaaagctattgttaaggaggcagatgacgctggaggaaacattttaaaaagccatccagcagaatgctcttatccctagaggacccgtttcctggtccctccactgcttctgacatttcttctcacctaaaaaaataaaatacagtgtatagaaaccttttaattaaaacacagcatagtaggtggaaatggaaaggctgccattgtttgttcctgctgttgtttagcagctgatacaggtattctgttactgtgctgcttagctactctgaacatgttaatttttcactgtattaatggttttccatattttcaactaagtacttatgtacgaataagtgtaagaaaatgcttgtttattggtggcacataaattcagagtcagaaatgatggtgatgccaaacaaccacagattttccatgtgggtggctaagatagtgacacctttgctttctgatggttcaatgtacacaaactgtttcatgcacaaaattattaaaaaatgtcgtataaaattatctttatgttatgtttataaggtatgtataaaacataaacaaattttgtgtttagacttgggttctatacccaaggtatcttattatgtatatgcaaatattccaaaatccaaaaaattcttaagtctgaaatacttctggtcccatgcattttggataagggatactcaacccggaatctcatgagccaattcccataatggtaaatatatttatttattataagaaatatgtattgtagtaaatattatttactatttactatagtaaatacatatttttactgtttactaatttatacatatatattatattcatagtatatttataaatacttataaatatttatatatatttactattacaggaattggcttacggaattatgaggactgataattatgagggctcacaatatgtcatttgcaagctgcagaaccaggaaagctggtgacttaatacggtctaagtctgaaggcctgagaaccaggggtctgtggtataagttctggagctcaaagatctgagaacaaagaacactgaagtccaagggcagaagaagatgaatgtcccagctcagatagggcaaattcacccctcctctgcctttttgttctagctgtgctgtcagttgattggaggatgtccactcacattggtgagggtgatcttcttcccccagtccacgaattcaaatgctaatctcttccagaaacaccctcacagtcacacccagaaataatgtttaccagctatgtgagtatcccttagcccagtcaagttgacacataaaattcaccatcacaattaggttgttgctattgctgttgttattgctgctgttgttggtgtgcgtgtgtatgtattttctgtgcaatgcttgctgttcgtctgagagtgaaaagattataaaagtgaatgttagcaaacacaaatttacataaaaacccaccaaagtcacttattctttcatggcagaagacctacaagcttttgttaggaattgaggacacaggtgtacctaagattaattcaaatgacataaaattcaggattccagtgtaactgcgccacagaaacagagcaccaagcacacatagcatgccactcaccattatttctggtactatgttagcagttcattcaaatcagtttcagccatttgtcaaccagaatctcataatggcctcgcaaaaatatttgtcaatatttcactaatactgctatgatatatttgcatttgtttgtttacctgtccagtttctcaattacaacactttgaggacagaaatgatgtcttattttgttatatcttcagaaacttgcattttatttgcgtaataagggcttaacaaaggattactgttaaatgagtaagttaatgaatgaattactgctttctcaacttctccagactcagcttcagaggcagtggcctctctattgcatctctattatgtgttaatgtgctgaatcttttcttgcccctcctgatctactctctaccttgctccatcttgctcagtcatcagggaggctgatgcatggtgactatatcaagagaccaacttctcctttgtcttctgtttggatttgcccaatgaaagcctggcacaggagactggagatggagaggaaagggagaataaaacctttgatcctttggctcgctctcagtatcgttgccacttaaccaccttgcactatagactgccatgactctcatggacatcctcttcctatacctactgtctctgcattttcgtaactgttccctccctttcaggcttagaaatggcaagggatctctgttgttaataacccagaatattgcaccatattttcttgacttccttaatcctgcctgcactgttataaaagatgcatttgttaaactctcttcaatttcctgtctgagtatgctatttgtttcctgctgggattgacagatatagacaggtactgtaatagttgtatgtacgatcttatgtaattaattttactccttgagtttgcaaagtaaatataactattcccattttacagaatacctatgatacaaatgtattctatctggaattcttattttattatttatttatttacttaacttattcattcatttttatttcccacagttcattggaaattcatctcttggcaagaatatacaccggggactactgtgggggtgtttgggggaagggagcaaatgttgaaaaactaactattaggtactatgctcaccacccaggtggtaggatcaattgtatcccaaacgtcagcatcatacaatatacccatgtaacaaacctgcatatgtacccctgaatctaaaatgaaagttaaaattattttaaaaaattaaataagaggaactttatctcttgatacaactgctagagcagggtggtacagagacaacctggcacaaaggaagtgtctccactggataaacgagtaggccgctttaagagggctcattgttgaatgtgggcaaaaagggggagagggaaagttataaaagaaggaatgaatggaagaggctcagctcagaataattttgctattataaacaacagtactaataaagttttgctccttctattcgtttgaatagagcaaggaaggcttgtgaaatttttattaatacctagcctaatagctatggggttaagtcaatgaattctaaaccagatattattacagcaccctctaaaaactaggggctctctccaattttacttgtttcgtatgcaatctctgcattctgagagctcttttccatacctgtgctgccacagtgagtcggtggccactctcagatctccatcctctaagatctactccagtttttctatcaggctcaagagtggagtgaattctgagccacctccatgggaagatgtttgtaacttacttatgcagtgaaactcagtgagtttgtatgttccctttgccacttatgctctaagttgccagagaagcatgagaaagaggtgtattagtctgttttcacgttgatatacagaacaacctaagactgggtagtttataaagaaaagaagtttaattgactcacagttcggcaggctgtacaagaagcatggctgggaggcttcgagacgcttacaaccatggtgaaaggtgaaggggaagcaagcatgtcttcacatggcggcaggagagagagagtgatgggggagttgctacgcacttgcaaacaactggatctcatgagaactctatcatgagaaaagcaagggcaaagtccacccccatgattcaattatctcccaccaggccccttccctgacacatgcggattacaatttgacatgatatttggtggagacacagagcaaaatcatatcaagagagtagacataacttactgttgaaagctacacaggcattaagccctgcttttccacgagatgctttattatgcttttaataaatgggtatgtttatagtctgtgtgatttaagaaatggtataccaaagggaggtgatgtcaaattataacatttcaaaatcaggtaaggcaggaacttcagactttttttggaaggtctaagaaagttacctgagtacattttaaacaccattgcctccattcttcagagggtttcgtttcaggaaagcataacaagagtcattctaatgtgattataaaggacccgaagctttgcttttaaaattcaatacttaggtagaaagaaaatgataactttttccctttgatttttattcactatttttataacactagcagccctgagacaccggattggaaatatctatgcctcttgatgttacctgggcaccactgcatcacagtcctttaaccgggtctgttttcatctgttccttgatcttctgcattctcccccaccaagcgacatcatttctatactctttagacttattctcagctttctggatgctaaatttgcctgttcactgattcaataaacatttactgagcacctactgtgtgccaggcccagatagagatcctgcactcatggaaattccagtcaaacaaaagggccaagaatgtgcaattgtaaatactggtatgttctgtgatggaaaagcattaagtgcaggggcataaggtaaggaatcttatctggtgtgcgggttcagagttttcctaggttatgatgttggaggagagttgtgattgatgagcctacgttaattaactgaggagcataggagtaaatataggaaaggggttagatagaaagcatggcatatgcagggactcggagactctgtggtgctgaaatcaggtatggatttgacttaaaccactgtactccagtgaactcatgcataaggtaaaagctcagaccttaagggatacaagtctgctttacctatcctgttctttcgtgtaacaatcctttttttgcttcacaactcagaacacataaagggatgatggagggaggtagatggtggagagtctggcttttattgcaatactaaaaagctctcagtgcttgggccaatcaaggtttacctgttgctcaagttttatgtccaccttggctaggcagaaagggagctttcattctttattggtactcagtgattctggctggcagaggctttactgttacagagaagagcacacgccaaataattaaccagctctgagaacttctctctagaagtgttgcacctttcactgggcaaagcaaatcgagggcaatgcttaacctccaactgcagcagggtggagccagcctgatgtttcaggctggtaagtagaaagctagaaatatttggtgagtgctatggtccgaatatttgggtccccttaaaattcatacgttgacccctaatcacccatttgatggtatcaggaggtggggtctgttgggagatgattagaatgggattagcaaccttatcaaaaaactgccttatccctcttccaccatgcgaggagaagacaccatctataagaaaaaggaatctccccagatagcagatatgcccatgccttgatcttggacttctcagcttagggaactgcaagaagaaaatttctatcattcgtaagcaatcagtctacgttgttttatgatagcagcctgaatggactaagacagtgagcaagagtagcgatcaccacggagatgagccttcatcaggtattgcagtctatggcaagagcacattactggcgctctgactgcaactaactggtttctaaccttctcttaattccaacaacttgtcactgcacaggtaaatgtgtgtgggtgatgacattgcagtgaagtcatagtgtgcagaagtggaagttggaaagtatttactaagaggtggtatagtggataaaattccacttccaatctttgagtttttcgtctactttctggaagaaggaaaagggtaatgggcccttaataatattttccaattatctgttgattttttaattggatctttcttaatttaatttccaagagctccttattctttgttcttctgtatgtagtgtactggttttgttttatgaatgcaatatagtcttttatttctctcaatattttaattatggtgtttctttcatgtgcttatttttccaccactttgtttttgccactcttttttctttatttgattctattttgttttgctctctatctctatcttccataatagaggctttcatcaaatatcaggtctttagctgtcatatataaaagtgagactcagaaaaaccccatttgggagcaagagtgtggcttattaatttgtgaatctcactgtaggtttgctactgtggtatcatatttttaattggggaaatatccaaatacctgtgtctagttcagaagttcttaaactttttggtgtcatggcagcctggtaaagtctaggatcctgttttagacttatgtcctatgcatgaaaccaattatatcacaatctggttctcaaactattaaaccattaaatttgtgatatagtcatatgtgcttttaattaatgcaccacctaataaactttagagttgtatctaataactactataattttgaaacaatgatgagtgaaaatgcaatttggagatacaggcaaagaataatgtgatacgaaaacaactgtgatttttattggtcacaaagtcacaggtaccaattatactacgacggtttgttgcctatactcaaagatgccagaaatgctgactttcagaagttagtttaaaataaaaatgaattattgttctcattcaagttcacagactcgctggttaaaaattcctgctgtaggtctttacttctgggtgaatggatttttctagaaatcagttcacccatctccaaccttaagtacgtaagtgtggctgtgagcctttcacgagccaagcaggggacaaatctctcttcagtggggaggcttttcctataatccctctgatttcaacacagtaactcacactccaaccaaaaatgtatttatttgctgtcttccaaattcaaatactgtctgataaaaccaatccaaaaataggccctaggttttctcttgatgcatcagggttggagaaagaatatgagaagtctaactcctattttaaagatatttaatccatactgtagttttcattcccatttttgcacacctgcctttaaagcagcaattgtctccaatccctgaggatttctgtagctttgtgttgaaaggattagctttttgatattctgcctcaacatacttagatctctatgttctctagtctaaaacagttcccagtggttaaactatttcccagatttcaaaatgttgcttcttttgtctggtatcttctttttgaggtttcttcccccgccccctaagttcctttactgtcattgctttgtgaacactcaggaggaagtacagatagacatttgcattcaacctatgttatttaaccagaagctttgatgcattcataagtagcattttaatatgtttgggttcgcatctttttccctctcataatagcatatctccttttctctgatttaatataaaagtaagaggagaaacaaggttgacatgcaatgtcactttaaggaaggcctcttttttgtgttttaaggaaaccatttcttaaaagaacttttctcagactctctctagatgctttcagcattttcgtttaagacattagactatgagttcttcaaaaggatgtatgtagtttcttttttggtagagtggtagaagtggaatagctcttattggtataaccctaccacggatcacaactgcaagctcttaagaaagtataaagactccctgaaatccctggagagaaacccaaagccaccataaattggaagtgaatcaaaactgggaagaaggaaatggaactgagtagcgttccattgataaggctttttggctaacggcatgccccaatcagaataagctagttagctaaatcccgaacagaaacccttggggtgtactgcttttaaaaaccaggggacagagtttagaactacgaaaacagacgaaaagtgagaggggaaatcatgcaaaggagaaactatacagggtagagcatcacattttgcacataaactctgcggaaaatcttaggatgacctctacactatgcacgcatggggcatactcccagcagcccatctaaggctaaaaagaaccgaacaaagattttagaagttacccactgcaggagtgacaaaaaatggatttgagttcttctagattaactacaaataaaaatcaacattcagagaaatagcagaatccagtctctacagtgtattcttttaaaaaaaaatgtccagggtataattccaaattattccatacatagtcaagaggaaaggcaattaaataaactgatcctgaaatgaaccagatgttagaacaggctagcaaggattttaacatagatactataactatgctcaagggtagaaggtaaaatatgtttgtgatgaatggatatacagaaaatctcagcagagagattgcaactttaaaaaagaaccaaatggaaattctagaaatgaggaataaaatatctgaaacaaaaggaaattaattgtatgggcttaacaagatgttaaggatgaaagaagagtcagtgacgtgaaggtatctcaatcaaaactatataatctagagagcagagagaaaaaatatttaaaaaattagaatctcagtgattgtgggactatatcaaaatctaatacatgtggagttttacaaggagataagaggcaggaacaggtaaaacccaacatctgaagaaagaatgtttaaaaatttcccccattttacagactcaaaaacctcacgtatcctatgtagtataaatagagaaaagacaccttgaaaatatcacaattcgatagataaaaacaaaagataaagagaatcttgaaagcatccatagaaaaaagacaaattacatatataagaacaaaaatacaaatcaccactgacatcttagcagaaacaatgaggctggaatatggtgtaatgacatctttaaaagtgccaaatgaaagcaacacactgaaaacctaaaattcaatgtgaagcaaaaatagctttcagaaataaagatgacataaaggcatttcagatgaacagaaacagtggtaactcttctcaagtagacttgccctacaagaaaagctaacagaagttcttcaagcaaaagtgaaatgagatcagataaaaattcagattttaatttccctaaaatactaatgattgtttaaaataaaaataacagtttgcatagcatcttatgtaataaacgtgaaaatacagaattaattataggaggtaaaagacctataggattgcaaagttattacattttatgagaaggggtgcttaactttcaatagaaaaattaagggtgcatattgcaatctttagagcaccactgaaataataaaataaagaggtaagctaaaaagccaagataaattaaaatggaattctaaaagcaatttcaattaactcaaaagtagcaggagaggagcatgaaggaaacacaaagcaagtgggacaaacagaaaagataacagtaaactgaaagactaaatcccaccacatcagtaggaaatgaagtattttaaaaggcagagattgtcagaattacttaaaaagcatgaactatttgttgtctacatgaaaggtactttgaatacaaaaaaatcaagtagatgccctctgaatacagaaactcccttaagggctgggaagatattctattataccatgcaacataaacagcataagaaggtgggggacgggggcggggcgggagagagaaagagagagagagagaatatgtgtgtgtgtgcgtgtgtgtgtgtgtgtgtgtgtgtgtgtgtgtgtgtcagagatatattttcccaggaatgcaaacatcatttaaattttgaaaatttatcaatatatttcaccttacaagagacctaaacatgcgatcatttcaacagatgcaaaaagcgtttgatgaaattcaacctccattcattacagaactctcagcgaattaggaacagaaagaaatttcctcaatccgataaaaagaatcaatgaaaaacattacaattagcatcatgcttaattgtttttttcctatgttccagaacaaggcaaagatacctactccaacaacttctagtcaatatttccagagacataaagtaaaaaccaaaaagaattaaaaggcatacagatcagaaagaagtaaaactctatttgcagataagattttttttacatagaaaatcctaatcaatgtataaagtaattactagatgtacaaagtgaatttagcaatgttgttttatatatgatcaatacactaacaccaattgtattttcatactctgcagcaacaaacaactagaaaacaaaattaataacaattccatgtattagggtgttaagaagcaaattactatttaggaaatttaacaaaggcaaggactgactcacatttaccttcattttcacaatgtttagcccaatgcctaaatgatatattcaacacaattttttgaaaagctaaagaatgtttgtctgctataaaaagattcaagttaaagtctttaaaaattccttagcaaactaacacaggaacagaaaaccaaacactgcatgtctgcatgttctcacttagaagtaggagctgaacaaggagaacacagggacacagggaggggaacggcacacactggagtctgttgcgtggtggatgcggggaggaagagcagtaggaaaaacagctaatgcacgccgggcttaatacctaagtggtgggttgacaggtgcagcaaaccaccatggcacatgtttacctatgtaacaaacctgcacatgtaccccagaacttaaaataaaaataaaattttaaaaagttatgatattcaattcaatgtagaaagagacagtaaaataatctttttcaaaaaaaaaattataggttgttttttccttcatctctctgtccaggtttaagtgcagcagggctcaaagaatggcacccacatgtcaggggcctgtgctcctttccttccgcactgggacctgtgctactttggcacctcagcaaagcatgtactgaagttgcacacaatcatctctgctcatgcaccattggctgaagttagttaaatggtcacatatagctgggcgtggtggctcacgcctgtaatcccagcactttgggaggccgaggcgggtggatcacctgaggtccggagttcgagaccagcctgaccaacaaggtaaaaccccgtctctattaaaaaatacaaaaattagggggtgtggttgtggacgtctgtaatcccagctactcaggaggctgaggcaggagaattgcttgaacccgggaggcggagtttgcagtgaaccgaaatcacggcactgcactccagcctgggctacagagtgagactccatctcaaaaaataataataataataaataaataaaataaaataaatggtcacacatagctgcaaggagggctgggattgtagtgcttaccctggaaagctattgtgctctattaaatttatatcaatattagataagggagattggacattagaagacaacttgttgtcactaacataccatttctaactgtctgacagatacagtgaagaagaattttaatggcgatattttaccgttctgaagactaaaacattttgagattattaatgaatttaaagctcacttctactaatccaccaaccagaatacaggaaaactgttcagctgctgtttttatttacttgaattctgtacgaataatcacttttagtcgtcaaaatcctaaaatatgaacttaacaagactcactgttaaatgcagagcgcttagaaaaccagacacagaacctgaccaggatttatgaatcatatgttaaaacagaaatcgtaaaataagatttatgcctggtcaaattatagattttagcatactgactcataaatcagtcacctgaatcccaagggcaataaaaggatttataaatcaaaactgatttaggatttattagctaaatgtctaccataagaatgccgtgtttataaatctcttttgacttacagaactaaatttcacaaactctacagtcagggcccatctctaatgatgcttttgaagggtatacatcctggtgaccctgaagaaacacggatcgatgataatgtcagaggaaagagaattgtattaaaattattaaacattatttaaataaattctaaaggatgatcttgtaagtaaaaacaacatctatctctatatttttgaattgtgaatatatgggtttaaatatttaaataataagaaaggccgagaaaggtggctcatgcctgtaatcccagcactttgggaggttgaggtggatcctaggagttccagaccagcctgggcaaagaaactgtgattaccccactgccctccagcctgggcaacagagtgagaccctatctcaacaaaaacaaaaacaaaaaagaaaaagataaattatgatttgagtataaaatgacatgtaaaggataatttacctcaactcccaaatcatttcagagtagattaaatgtttcagaacacattaaatgacaacatttctctactagatataccagtccctttttaattcctaatttgacaaacatattacttttttattgaaattatataatatattttattacaaataaaaagtatttgtgttaatttgaactatcttatttttaaggttcaattttctcatgtatcatggcctgtttagagtctctgggtttgcctcccacttggtagaatggaattgttctaaatattcacgtggctgacttaagtcattttgttctgttctctactcagatgtcacctcctcagggcctcttctgtgttcatccctgaccatccagtgggaagcagcatccacatcaccctgtccttcaggcttcttcgtcttcttttctcatagaaagataataataagcaacctgaaagtttaattccaaggtggcaaggttaatgagtgatagtacaggcttacggttggactgtgtaatggtttctaccttctggttaataagatgcttattcttttttttttttttttttttttttttgagacggagtctcgcccaggctggagttcagtggtgcgatctcggctcactgcaagctccgcctcccgggttcacgccagtctcctgtaagaaagcccacctcagcctccccagtagctgggactacaggcgcctgccaccacgcccggctaattttttttgtatttttttagtagagatggggtttcaccgtgttagccaggatggtctcgatctcctgacctcgtgatccgcccgcctcggcctcccaaagtgctgagattacagtttattcttaattaaataagatagtttacattacccacttctcaataattgagagattaaacagataattaagcacgtaaatatggtgttttcttaggtgagacatggacctggctgtccaggttgaatatcagagatttctgaagcaaaataaatgaagaataaaataactttattttttgagctccttttcctgtgactacaactttgtggtatctttttccaaacagagaagagaaagataacatagtatgtcctctaacatgatggattgtaattggcttttggctattcttggtttaaaaaactattttagtctcacagcatgttagtggtaatgtgtaaatatttagaattgttagcaaatttgagaaaacttctgttagatttctttcaaatacaagtagtaatattgtatttggaagaactgtgccacagattctcttctgactcctattttgaaactttgtttcttcatcaccacccaatcacttccattttgcttagttgtaggagtcactttgatcacacattcatgttggcatctgatcttgctttgcccctaggcatcagaatactgaatgagttggtgtggtgggctgttgatcatgcttgggagctattcctatattggaatggctagcaataatttaactatacatggaagtgattatgacctatgtactaaatgcagactaaatttactcacaattccacttcccccaactggaacccccaaatggtgaagtcattttaaagcctctagggagaggaaattgaagtagaaagaggtcatagtcttgaaagagatcatttaaatatcttacttttgcaactgctgcaaaatgcatgaccatgggaatgcaccgtcttaggtgtaaggaagaagcccatgcagtacaccaacccgagagagaaagctttattaacgtcgggatagattctactctgcttacagccctacagcaacaatagtggatacgtcaggaaataacttgcccagctcagggaggaagttcattgtggctcgacgctgcttcagaggacatttaaaaggcacaaaaacaacccagtggaaatgccagcttcccagcatctagacaatgaaggcggaagtggcccctgagcacaggaggaagtgcaacttgccaggagtcaagagctgagcaaggttgaaggtgcatttttctggttagggagccagggtgcaaggactcatttttatttttcttaaaatcaagcacagaggggtccaggttgtgcaatgttcgggctcagaaactgatcgcctgaaatacggtgttttgacatactcaactgaaggatcttcaaagtccctttgaccttctccccactcctgtctctcaattccctgtctctctccaagcacagaatgaagttgttcccagaagttccctcatctggctaaagtccagactcgccaaagaaaaaaacaattacctatgatcccctccctgatttttcactaactgaagtcatatgggaggaacaaagactgaagtctgtcaacacacctggacagacttgtcacaaaccatggtctgttttgtgggcccaagagactttgtcccaggccattgtatgttcttcaagcccatttaatttgcctaaaaacaatttgctatccccctaagatcatccacacttccccatctccctttaccctgaagataagggtatataaccatctgtaccccaatgtgtggtggggcaaccactctatgattctctcccatgcgcattaataattttatatgccatctattaatgtgacttttgtcagataattttcaacgaaccttcagagggcaaaggaaaagcttttccttggcacctagagcagcattcaggttacgggttttgttccttcctgctgaaagttgtaattctatttctacttttttttttttttctttttttggctcccattgccaaggaaacctcgatttcaaccaatacaactttcctgttatactaataccattccctgatttacccatcatgtatgaataatggaagcatacattagagaatagaaagtagctaaacggagtaccagctgatgttctaagtggttcataagtattaattcatttaaaccttgtagcaacctatggggctgattctactgttatcactattttacatctattacactattttatcacttatttttggcacaggcaaagctttgtaaatttgtttggggtcttactgagaacccatgggtctctgttagctattcaatcacttcgatcaaacacaaatgaattttatatagcattttattttcaatacttctgaatatatttaccatggtaatttaaagtaaccctttatgtaagtctacataagtgtgaagaaattagtttatgaaatgatggtttgattacatcccttaattgataattacataggataataggagtggacaatgaaatgttttttggtaaggtttatttgtctaatgattattatttttaagagacagggttgtgctctgtgcccaggatgcagtgcagtggcatgagtatggctcattacagcctcgaactcctgggctcaagcaattctcctgtctcagcctcctgagtagttgagattacaggcgtgtgtcatcacatctggctaattttctcattttttatagagatgaagtcttgctatgttgtccaggttggtcttaaaaacttctagcatcaaactatcctcccacctcagcatcccaaagtgctgggatcacaggcatgagccaccaagcccggccagtatgggttatttagagcagtgtggtctaagggccattggttaaagaatctcctagtgagggataattaataataatgtagattttctaccctaattttctacccactggatctgaatttctagattagattctgggaaagtgttatttttagaaagtactcctaggtgattttagtgcataataaagtctgagaatctctaatttaaacaaatttaaattctgtgaaatctctacttttcactgaatagacataattaaggtctagtgtttacaactgcaagacatttataagcttgaatgtgatttaagacaggaatacatgataaatatgtttttgttccttgtgtgcaaatacaggcttaaaagtgttgtttgaaacaaatgatgcagtaaaagaaaaaaaaaaagaaactacaagttttacagacctttaaatcagaccgttgactaattgaaacacataggggttagtcttcctagaggcataatctgaaaaatagagcaggttttactggcttaggatacatcgttccaggataagctcttttctctcatgtgctacttttttcatgtacccagaaaacaataaattttggggttctgcagttctatgtgagcactcccatctcataaatatttagactagaagaaaagagccaggatcattcttttaaaaagtttaatgaatttttaaaaatgtatgaacatggttgggaagcctgccagtgattaaagagtgttcattttaatattgtactcttttccctttccaaattctttcccacacctcatcggactgtacatttctcttaataaacctaatttaaaatgaattattttagtcattttcatcacaaaatttaatgatcaaccttcttaattttctatttctgtgtctttgttttcatgtcatgtcacctacagggcacattctgtatgctgtatgttaaattaatatttctaccatggctgcaatgggtatttgatgcactacagaaaagtgtagagtgtgggccagatcctcaaagatctcaaatccgaattgaggtgtttatacatgtacgaaatgccagggactgtcaagcttttgaatgatttagaattacagtaaagtcaatctaagcttccacggtattatttgtaatccactgacacgcctcataaacaaaaatttaaaaagaataagaaaaaatgcaaataacttcattttaccctccgtgtaagtcagtataaacagattgttcattttcctttgtcaggtgagtttcaagaaactacaggcatacctcattttattgtattttctttattgagtctcacagatattatgttatttataaattgaagatctgtggcagcccttcattgagcaagtctattggcacaatttttccaacagcatatgctcactttgtgtttctgtgtcacattttggtaattttcacaatatgtcaaactttttcattatatctgtttttcactatatctttttcattacatctgttatggtaattgtgatcagtgatctttgatgatgttactattgtaattactttcggccaccacaaactgcacctgtataagatggtgaacttaattgataaatgttgtgtgtgttctcactgctccattgaccagctgttcccaatctttctctctcccctcaggcctccctcctccctgaaacacaaaaacattgaaattaggccaattaataactctacaatggcctctaagagttaaaatgaaaggaagtgtaaaatggtttctcacttgaaatcaaaagctagaaatgattaagcttcgtgaggaaggcaagttgaaagctgagacagccaaaagctgactcccgcaccagggagccaagttgtgcaagcaaaggaaaagttcttgaaggaaattaaaagtgctgctccagtgaacacatgaatgataagaaagcaaaagtgatctgggtagaagatcaaaccagccacaacatgcccttaagccaaagcctaatccagagcaaggctttaactctcttcaagtttgtgaagactgagagaggtaaggaaagtgcagaaggaaagttaaatgctagaagagtcggttcaggaggtttcaggaaaaagccatctccacaaataaacatacaacgcgaagcaacaaatgctgatgtagaagctgtggcaagttttccagaagagctagctcagatcattgataaacgtggctacattaaacaacatattttcagtgtggatgaaacagagtcctattggaagaagacaccatctaggactttcatagctacagggaaaagtcaatgactggcttcaaagcttcaaagaacagggtgactctcttgtcagacactaatacagctgctgacttgaagttgaagccagtgctcactgcacattctgaaaacttaaggatccttaagaactgtgctaaatctactgtgcctatgtgcaacaaagcccttatggcagcatgtctgtttacagtatcatttactgaatatttgaagcctactactgagaactactgctcaggaaaaaagatacttttcaaaatagtactgctctttgacaatggacctggtcacccaagagctctgatggaggtgtgcaaggagatgaacgctgtgttcatgcctgctaacacaacacccgttctgtactccatggatcacagagtaattttgactttcaagtcttattatttgagaaataaattttgtaaggctatagctgccacacatagttattcctgtgatggatccgggcaaagtaaattgaaaacctagaaaagagtcaccattctagatgtcactaagaacatttgtgattcatgggaggaggttaaattatcaacattaatagaagtttgaaagaaatttattccagccctcatggatgactttgatgggttcaagactttggtagaggaagtaactgcaggtatagtgataatatcaaggaaattagaactaaaagtggagcctgaagatgtgactgaattgcttcagtctcacgataaaacttgaacataacagcagttaattcttacggattagcaaaaaagtggttttgtgagatggaatctattcctggtgaaaatgctgtgaacactgtggaaatgacaacaaaggatttagaatattacataaacttagttgataaagcagcagtagggtttagaaggattgactccaattttgaaagaagttctacggtgggtcaaacgctaccgaagagcgttgcacgctatagagaaatctttcatgaaaggaggagtcaactgatgtagcagacttcactgttgtcttatttttaaaaatttccacagccaccccaattttcagcaaccaccaccttgatcagtcagcagccatcagcatcaaagcaagaccctcttccagcaaaaaaattacaacaacttgctgaaggctcggatgatttttagcaacaaactattttaaaattaaggtatgtacattgttttttgggtgtaatgctactgcacccttaatagactacagtataaacaactttatatgtaccaagaaaccaaaaaattcatgtgactcactttgttgccatatgtgccttattttggtagtccagaatggaacctacaatgtctgcaaggtataattgtactttgtcagccactccagctttcttttggttaatatttgcatggtatatctttttccatccttttacttaagttagctatttcagtagagttgaaatgaataacatatatttgagtaggttcagaacaaaatccatttgctgtttttactggtatgtttagatcattaatgtaattattgatatgtttgaatttaggtatatcattttgtgatttgctttctgtttgttccctctgtttttcattcctttgactccccttttctgccttcttttcagttataagaatatttattagtatccattttaattgatctactatgattttgactatattactctgtagttctttattgttctttttagtgggtgctctagggattacaggatatatacttaactcttcatcatcacctagaatcaattttgtatcattttagttggaatatagaaaccttatcatcttattgatccattaacctttcccctcctgtgctagtcatgttaaatattacatctaaaccattgaatgtgctatcatacatatcatatgttttcacattaaatagtcgattgcattttaacaaactcaagaggagaaaaacagcctaccatatttactaactagtactgctagtggggcaggactttgattttttactcttctttttcctttatgatattccatgttttctctggtatcatttgctttcttcctgaagaacttttacatcaggtctgctggattaatattttcttaatttttcttaatttaagaatgtctttattttctctctattcttggagaatattttttacttgatatagaggttgataattctattcttttggcacttaaaaaatatgccactttcctggcctctaaggtttctgatgagaaaatgaagtcattcaaatcacagctcccctataggtaatgttttgtttttctctggctgcttccaaattttttttctttagcttttaaccaatttgattatgatgtatctgggtgtgaatttcattgggtttatccagtttggaatttcctcagcttcttagatctgtaatttatttctttcaccaaacttgggatttttttagctccatactctttctcctttcttctgggattctgatggcacagatgctaaaccctgtccacattatgcttgcttacttagacagaactagagggcttctcctgcagctctctgttcatgtcctgaagcctatttctatgttttgggctgcgtttagtccaaagtcgagtaacagagggaaacaactggtaaatttatggctagttgggcagtatttcaaattttgtctggttccccaatccacctgctagtatttactttccacagtcctgaagtagctgcttcgtgcattctgtccacgctctccatagttatgctcagtaggaggcagagcgtggagcttgttttcttcatcttactcagaactggaaccaaccctcccaactaaatataatgagacaaaagctattttaccacaaacactaaacaaaatatataacatgtatattatgctggtggtgtaaagccaacaggctgaataaaaagaaactcattttagaattgatagacctcagctgatcctcactatgatcaatgactttttatttggcatgccatctggcatttatttgcttccactgaaaatacattctgtctggagattgttccaaatgtaggttatgcacaatatcatcggaggcaagttgttgtgctttttgttcttttaagtcttacaagtcttgacttaaatggagaaaactgctgattaacacaattttttaaagagcttaatcagggaaattctcaactgttacatacaaaggaacactcaatctatacagcactaggatcactctgccaaaagagccggcagttagaacaccactgtgtgcattatttattgacatattgtcaatggagatgagccattggaattctttaatgaatcatttttaaagcaaatcattacccactgatttttgatattatatatgtaatttttttctataaatcaggtttatatatttttatttagatttgatttcctagtttctgagtgggtttctccctctaattcacaagccagcctagggtaacatggcagacttgtgtatctaatgtacatgacttttcaggcagtattatgccttcagcaaccactgggcagcaggacaccgtacttaattagctgcttttgcagttatcagactgcaatcacatttgattaagggcaccatttatttcactcaaggccgagagtgctctcctggggagaggcaggtggtactctcctgttgatgaagtccagagagccagagagacagcctgtgaccagaagtgacactctgcagctcagtcacagactttccaaatgaccttgcagaagtcatttttctccccatcatgttttatttattttattttttaaattattattatgattctttttgatcactctgttgctcaggctggactcaaactcctggactcaagcaaccttcccacctcaaccttccaagtagctgggatgacaggcatgtatttccatgcccagcttaaaacccagatgttttcaaagcccaatgttttcatcaatgacaggaaaaatttgtaaagcccttctaagtgcttctttgtataaatatatatgtcaggggggcaagttactattccctgtctacacatgaacaaactgaggctcggtgatattaggagatctaagttcacacagcatcaggaacccaagcccgatttttctgtggtatttctcttacaacttcctatcacaaaactactgttaatcaagaatagaatcacaaagcattgtttcctgtttaattctacttggcaaaagccaagagggtctatttacttaatataagaatgaatattacttgagactgcaacctcaaagtagagttttcagcatttatttgataaacttaaattctaatatatttctatgtgtaatacttcagaggctgatcctacattatacctgatgtttgtttaaaaaaaatgttgtatccacacagtagagttggctatttgcaaccacaggtagctcttattttttgcaaaatgcagcatagagagatatagttttgcttatgtttttgacagtgtgagttgatacagaaatatgtttaaagtaatttgtcatgtttttctctatttttgccagatttgtgcaaaggcataaattgttttttattactgtagggtctttttcttcctctcctttctgtaaccatgaatattgaaattaaaaattctctttgtttctgagtcacagagttaccatcggctaaatagctgaggctttcacccatagcactttcagatggaatcctattataccttatgaggttatcatcaccctctgaaattttcattagttatgggtgtgtacatcctaacattttgcagttgggagacagctgggagacactgtgttctgggttgcagctgcccatcagaattcttccaacataatggaataaaaatcactgggtgtgtgtaattcttccctcctcaattttatcaacaaaacattttatctccaaaaatcatgaaggtgagttgcacaggagcctgttgtcttaacagtcataggctggcagatcatattgcctcattgatggagcacattcaacccagaaacatgacaggaggttaaattattataatcaaattggcttttcaattctagtctctatcatctgattataatttatcataaacagtgtgattagaaagtgacaattgattctatcattccttttactctgtaatgacacctaatctgtattccatgagaagatactatttgaaaccaataacacattcaaatgatggtttgattttgctaagcaaatatttttccagatgatgaacactagtttagaacccacaaaatgtcagatttttcatgtttaaatgaagaattgatctgtgtttaaataatctattctggatccttcaatctattaggccctgtggctttgatagtgagttggcagactagcttctcgtcctcttaggtctggaatgtggaagggcagacagatattaaggaacataaataaactgataaatagtaacaggatagtgtattagtctgtcttcacactgctaggaagaaatacctgagactgggtaatttataaagaaaagaggcttaattgactcatggttccataggctgtacagatagcatgactggggagacgtcagaaaactttcaatcatggcagacggtgaaggggaatcaggcacgtcctcacatggccagagcaggaaagacagtgaaaggggaagggctacacacttttaaacaaccagatctcatgaggactcactcactatcacaagaacagcaagggagaaatccacgcccatgatccattcaccttccaccaggcccctcctacaacactgaggattgcaattcgacatgaaatttgggtagagacacaaatccaaacctatcaaatagagaagggataatgctacggcagcaaacagcagggaatcaaatccagatatagtgggtaagaaaaggttctctccaaaatatagcgtttaggtcttcaaaaggatagcaatgaatcattttcactcatggcatcttgaaaccttcttcagatcttcaagagccagtgaggagtagcagaaacaggccaagtatgtctcattttaaatgccagccctttacatagcagctatacgaaatgacttattctgagcctcatcctcctcatctgaacagacaggaataatacataggtcacaaggactattctgaaggttaattaacttatatgttttacacatcggtgacagagaacgcattaaataaatggtagttctctttcttccaacaattcctgctgccaccaaaaacactttcttttataatatccaactgtgatgtctatctaattaaggcagctcctaaacctagattatatgaacagatatgaggtaatctgatttggaaacaatccaagtcaataaaaatgggcgctcacatagactgctttgttatggtaacatattcaattcagaatgaactgaaatatcacaaatcctacattttatgtaacataaaacgcaacaagcaaatagaagaaaataaaggcattgattgtccccaccaccacaaggagtgtattcaggttgattagtgaaggacagatcagttttgatagaggtaaagagggctaaaatagcatccgaatgtaaagaggggagaaatctcagtgtattcctgaatttccctaaggctccgttgttggcttgctgttctatttcttatacctctcttcagaaaatctcattcattcccacacacctttcaaccccagcatctccaggctttttactcccagacctatatgtgatgtttcatgctctccactgggcttcagaatggaacattccaccatctgaagctcactgagtttggttcataccctacaggcttttccttgtttaatgtactaaaagtagaattcattcccgtttctgaaccttcctgaatattccccattagttctcagcacaccatccagcctcttatccaaagcagaaacctcagaattaattcagacatgttcctctcatttagccccaatccttaggtccacatcccatcagtcctcaagtactaatctcttctgtcctttcatcctgtagcacaagacactgtcaaatagcaccaacctttgctttccaggtgtactgggcagataggtagtggcagtaatgcctgggagttggttacaagcgcagaatttcaggccccatccagacctaccaagtctgaatcggcatgttaaaaaggtgtctgggcgactccattacaaccatgatcaaacttttccattgcctttttttaattacaagaattttcaaacatataagaatcatagataatataaaacacccatatgccactacctggatttattacatgttaataattatactttcttgagatatttaatttaaaacaattttttgagacagggtcttgctatgttgtccaggctggtctcaaattccttggctcaggcaatcctcccacctcagcctcccgtgtagctgtgaatgcagatgcaatccaccatgattaagcaatgaaatgtcagagttgaaggccacttcccaacactcctccctagggtgaccaatgtgtctcagtttgcccgggaccatccaggttgctgcactcaaagtattgaatccctggaaacttctcagtcctgggcaatcctgaaattcattggtactcttctctccctcagatatttacacattcatgacatgtgtttgttttcataaataatacacagaattattttatgtgtttatgcaaatggcatcatgtagtacacattgctcttcagttagctcttcacacagcattattcgttttgagatttactctaatgttatgttaacatgaactgagttattttaattgctgtatcctttgcacgaatatactctatccacttggtcttctgatggaggtgtgggttgcttccaatgttttgctattttttaaataatacgtcaatcaacagtataaatgtctccttgggcatatttggaaatttcctagggaatatatcttgaagaggtgttactgctaaatcctaaagtatgtctatcttcagctttactatatggggtctgattgctctctatgtggaacagttcttgttctcccatcaacaatgtgagagcccttttatctttgcccacattgcttggcactatcagacttacggagtatttgagcccaatgggtatgagacggtatttcaatgttttaagttggtttgtcctgctttagttagccaggtggatcatctttcacttgtttatggaccatccagttttctgctctatgcctttttttgtgcacacacattgcccattatcctattcaggcattgcggatactaatctcctgtgaatcatatgaattgcaaatatcttctccaagtgagggtttgccttacatttttatctaggaattctgttgctctctatattaaaaattttaaaaatcaagatataattcacgtcccacaaaactcaccattttaaagtgtacagttcggtgttttttagtaatcttttcttttgtgttttttaatcttttattttagacattttttctatcctgataccataaatgctattctcctcccattaaaaaaatgtaattgtttgctttttgtttttacatatttagtctgataagagtggattttttattgtggagtgatgaattgatctcatttaatgtttatgcatatggatagctagttattttagcaacatctgttacataatctatccacctccactagtctgtaatgccatttctgttatccatcaagtttccatatatacgtcagtcagtttctaagctccaaattcttttggtttatccattaaccaatatcacacaatttcttttttataactttataataaatcttgatgtctgtaaggcatatcttctgaccttattctttttcataactctcttctcttcccacgatctttactgtcccacataaattttaggcccattctttcaaattcaacataaaatgttcttgtggattttgattggaattgcactgaatgtacagatagttcaggaagaactgccatgtttaaatattgacatctttacaatacctgcatccacaatttgatatgtctcttaatttcattaggtctctctttatcccttgtaatttttacatggttataatactcactaaatgcatatattattactggattccttactggatatattatagttttaaatattgtattttagatttatttatgcacatatctattacattttcttattgattgttgatggtatgtaggaatataccactttggacactgatcttatatcctgcaattttggtgaattccgttatttttcatagtctgagaaatactgacaatcatctcatttgtaaatgagagcaatttactttcttcctttccagtctttattacctttttaaaaatgtgtcttgctgattgcactggccaggacttccagtacaatgctgactagaagtggtagaaggcactagtttgtcatatttttgcctttaaaggcaagggttataacaacataccattgattatgctgcctgagatagggtggtggtttttaaaatatatatttattaggttaaacattttttcttctatatccctagtttgctaagcattttaactctgagtgatgactttaattgcttttccttttaaaactgatcttagaattaccctgctttaagaggcctttccagcaatctaaagttggaataaaagctcctcgtctctgatcccactgcattttgtgcttccagtggcaagttcatctgctgatgtgtctatgctcctcagtagcttctaagcaactcaagggcaggaacgtgatgtttgattcatggctatatcctccggcacctgatgtagatcactaaaaactgtacatagctgtaagataaattgtggaaaacatgttctagaaaccttatttttccttcctcaaaaccaattctgtttctgacaattaggcttaatttacaaagacaattataacagcatagaaattggactgagaaaagttttagttatctacacatttatattttcttttaatacaataactcatagaatgcaaatatacatttgaaaatcactgacttccttcttatagcaaacataagttgttgctacattctaaatcaagttcatatttattttaacatcatattagttacttatctgtgtcattattaaaacaaaaataagactcccacaagctttgatttcttcagtatgtacctcctagaggtcttttcatatctaattactaagattattttaacttaattaatttaaatggttttttttttttttactaatgccaaaggcctttttaaatgcgttacgtttgtcagtgtttgaatagccttacctgattaatccagaacactaagatacttaatgatcataggacctcaaatgccactcgaaaatatgaaacctttatcttttaactcagttttgctttcatgcatagcatggctctcaaatcacggttgtgatatttattagctgtctttgccaaactgcgggtaatacatctttcacatttcattgagaagaaaagaaatttaatctcaccaggatctccattattagttctccctcttggttttttttcctgtggggattttatgttggccagatggggctctgaagaatccacagaccgatgagtgctttacaatggcaaagtggaaaagcaaaatctatttttgagttaggaaattaaatgcgatatattgtcatctagctcactatgtccaaactagtcaatattttgttcatattcagtattgtacaattattctcttacaaaagagaataccttcattttcctcaactttacttcagttccatgtttagcttgttctactggataacagtaattaaccactcaattgcaccctctattcccttaaattctaccaactccgaagaggactctataaaccacatttttacactggatctactttctggggaatgccaattaaatctcattagcagcaaaaagttaaacatccctttccatattcatcacagatctatcttccatgaagcagagttgctgaatcaaatgtttgagaatcaatctggtgggaaattgtttatttcttgaattggcccaattctcatttttaaatattctgaggcttctatcttcgggtagttgccctcatgttcaaaaatctcttaaatggagaaataattataaggtcacatagtttgtcataaatggtttcaaatagtgtaacatctcaaagtttgcattccaaatatttcatttatggaataaataaaaagcaacttcatttggagccttcttatctttgtctattgtcttaatgatgcctaagaatgtgtcggttctatataaaatcggatatctgatttccagaaaagtactgaattattttgtttcagttttgctaggcatgaccaacaaaagcacatcattaaaggatctatcttttgtctgacctacatattcctacatatattcaaaggttactcgttccccactagccacactgaacagtagggactttctcaactggatcatttcctttcttgtatctttgactttgtatgctagagtctgtcttaaaaccatgtccctttcttcactatttatgtaaatatctacttttccttcaaaactctgatcagattccatgttgatgatctgttccctaaacatctcctcctaaacacacacacacacacacacacacacacacacagagacatacacaaacacacacacacagagacatacacaaacacacacacacacacacacacacacacacggacagacttagctttccagtcctccaataatacttcatagattagctctttgaattagaattatttgtctatgctctcttttcttatcagattttgaggtcttggaagtcagagtccatcattttttcatctttggatcccaggacctaggccaccactgccatggtagcaggcactcaatgtgcatttataaataatagattgaattaaacttgctgaatactgtaaaaattattattaaattctggataatactgattctcctatactaaagccagtatctgtgactataatgaccagaagtagacaggccatcttttaagttcaattttaaagtttttcataagacagaagtaaatcttaaaattcctagcagaagcaagaaagaaaaagggcacctgaatttatttgccaaaattcactcatatttagaatagaaagaatctaaaaaaaaaaaatgagagggcagggcacagtggctcttgcctgtcagcactttgggaagccgaggtgggcagatcacttgaggccaggagtccaacaccagcctggacaacatggtgaaaaccactctctactaaaaatacaaaaattagccaagcatggtggtgcctgcctgtaatcccagctacttgggaggttgaggcatgagaattgcttgaactcaggaggcggaggctgcagtgagctgagattgtgccacagcactccagcctgggtgacagaatgagactctgtctcaaaaataaataaataaatacaataaataaaaaaggagagcaaactgaaaaaaataagacttttcaactaaattagctcctgtgactgctttataaacaaatcttaatggttagtttgcaaaacagcaaaggcaattgaagttagcagaattaagggctaaacagcaactctgatgatttcagctggtgactaggggaagacctcagcaaggacagtcaagtggccctaaaccaaccaatttgcaaacactctaaaatgcccaaattatattttgctctctttttagctcattttaaactgagcaaacatttttattttaaaaacaaacaaaaacataaaccaaattataaaaatattcatttaagttacctaatatttcattgtgttactgctttgttccttattacttttctaataaccacaagggtttacctttctgttacaacagttaaaatgatttcactaagaatgtgcccggatgcttgaaaaagaggaaacatcatttatgaatttcaaaacagaaatatgtgacaacctgtgtatgaaggaacccttgtaagcattctggaattaatttttttcctacctcctgcatcgccgaccacccattaaaaaaaaaaaacactttgggtggagttaagaattcttttcaaatgttaaacaataactggaaatcctgaaaatgtattctcttttatcaagtgggaaaacgctttaaagtatccccccaccactgccacctttctttttgctaagaattgtttagcatgatatttactcagaggtttctattttgaacagaaagttcagttataactgcctgaaatatgatgccatctgtgtttattttcccttctgaaacacgattttttcccccaaacatagcaagtacctggtcctaataacctagatacatgtatcagctcaaccaattcttcacttaaccagcggtgagattaaagatatagaacatgtaccataaaaatgtgaacttcactgcaaatgtaaatcatatcaagtacatctataaattcaaatatataaaaatattctgattaataagtagttatgagttatatgtatttaccagggtggaggtagctatggagtgagaaagagggcacacagcacactccatgatatagttagtgaatcaagagctaagctaggagccagatgaccaaagaatcacagaatcagtttgacttcacattctccaagttatactcgcacctctacctgggacagcagcatctggtatgtggagacagtttgagaaaaaaaaaatttaaatttattaataatatattttgttactttaaatactgcgaagtaatatgccactgtaaacatcattatatatttaaatttgagctgataagttactgtaaaaaatcatcctgacagttttctaatgtaaaaagtgggcttaatttcttttctaccaaaccatccatgaagaaaaattcaaacattttattggagcttatttgcatttcaaggaaggcttaaattctatacatggtttttaattatagcttgacatttctttcacatctattatagtgttcaagagtatcccaaagtatgattttttattttgtattctcagagtcatgatctctaataggagcctcaacactgattccagaaagtttatgtggtgccaggttttctattctcgggaaatggaggatgtgtaacaagccgtctcaacggacacttccctaaaacagccaggcacatatgacttagcgcctaatgtttcccgtttccacttgagcctttgtagggcatgaattaaacagaacatttcccaaatcatcatgatactgacttgaaaaacaagaacagaagacagaggcacaaccgttgctgctctctgaaagccatggggattttgactcaagaaattcttatgttcccaattctcaaccctcgtttctcagttgtgggttcctctcttgaggaattgacaagtgcacacttttccagccgtacagccctggaggcaggtccagcttccatatttccctttgtccagaatcggctctaaaataaatttctaatttgttacaaggaaatgcttcacagagtctacatgtacatatttcatttgtgtttttgtgccttgttgtttatcactttgcattactcatacctagcttgtcttaggctctaaacttgtttcctgaagttgctgtatgtgtatcatgtgagaactgacatttcatgtctcaactgttttttattcataacctctctttttcctgacatctactggatgtattaaattaatacatgatgacaaaataaactggctataattaaataacaaatcttaacttgcacaaaacagacaaaaccatatcactgatgatgttataaaattatcaataaaatgatgtctacttaaaacattattatagtacacaaagtaaaacaataaaagaataactctttttagttcctttataatgaaggcaatttattttgtatattattttgcatattttgtcaaacaatatagtccattagatagcgatgtgttaatatctccagtaaagatttcatgtcaataaccaatcttgaaatctcttgcccacaactatcacttagtacttttaaaagacataactggacaactggacaagaggaagagcatcagtattgccaaatctgacgaatactcacgagaggatattcccaatataagcgtagtaggagcaacagtagggcgtggttccatcacagcagtaagatttgcaatctttgccacactgagcaaggcaatcatctacaaaacaaaaaccacttgtgagcagttatagttgtaaaatcacagtttcaagaaaaattattctatttcacaacttaatcagccaatgaccaccctttagtggttttaaatcttcattttcgtcctcagaattcaaaaacatttgtaaggatctaaattagcctctcttccccattagactctaagctgtaaagacaaagacaactcttgaatcttctacaccaagcaccataattaccagtcagggttagtggaatgagataatgaaggaaggaatgaaagaacaattaaactactcagtcgctggatttgtccatagagtttttataataatttttaaatgataaagccttcttggccaggcaaaatggctcacgcatgtaatcccagcactttgggaggctgaggcgggtgatcacttgaggtcaggagtctgagaccagcctggccaacatgataaaatcccgtgtctactaaaaatacaaaaagtagctgggtgtcgtggtgcacacctgtaatctcagctactcaggaggctgaggcaggagaattacttgaacccaggagatggaggttgcaatgagccgagatcatgccactgcactccagcctgggcgacacagtgaggctctgtctcaaaaaaaaaaaaaaaaaaaagagtcttcttactttagggtcttgtattcccaactgagctcaatcaatagaaggtttagtggcatatataataccaaaaaggaataatttcaaaatgatgtatatttttccatgatagtgcattgtatgcttttcatttggtgacttttttttacctgtataattacagtttgcatatgtgtggtaacacaatgagtctgcatcctgtaaattcatctggatgaaaagatgattggttataggaagaaatccccagagacaattattttgtaaataatgaagagtttacttaatgtcagattgaggaatcagtaagatataaaacagtactatgtgaagggggaagagttattttctgaataaaggatcagaaattactattttttccatatattttgctgcaagaaaaattatactaaaaatgttggataaaaattactctagcttttaagtattctttattccacctaaatgatttatgtttaacaagcaaaggttgtcactgacttagtcgtataagttatgatggatatataagtttcagatacatgattaggaaaacattaagtacagtctgataatttatgttgtacatttaagagtcacaaaataatccatttccagctcaattcctgaaggtaatattaattattatataaattatataaaacttttgtttccctatcaaagctataacattaaaaatacaaaatattatatttatgtctgcacgtccatgtaactgatttatccagaaaggaaattttacattgcttttaaatcacttccctgctaagatgatactttacaaagagatgtgattaaaaggcagcaaagttcagtcaccattaacaattatgcgtggcttttgtggaacaaatggaaaagttcgtattttcttctcctcaattttatttttacattacagattgtcaaacatgacccttgaggcttacctctggattgtggtatgaaggaatgaaagcgaaaaataattacctttgtgagattcagtaagtacttaagtccacttttaaaatttgaaaacagaaacaaaatctaacgatttagacacaagggagaagccaatatattgacaatagatgctttttgcagagtacaacagacttttaaaggctatttattttacagttttcttggtgaatttccatagctctcatttttagtgctgtttaatttattcaaatatttagactggtcagttatcccaagggcttagtggggatgttttgcttcatgttcttaaaagccattcaatgtacgcctacagccatctgatctttgacaaagtcagcaaaaataagcaatggggaaaggactccctactcaataaatggtgttggataaccagttggccatacacagaagaatgaaactggactcctatcttttaccacatacaaaaattaactgaaaatggattaaagatttaaatgaaagacctcaaactataagactcctagaagaaaagctaggaagcaccgttcctgacatcagccttgggaaggaatttataactaagtcctcaatagcaattgcaacaaaagcaattgacaagcgggatttaattaaactaaagagcttctgcacagcaaaataaactatcaacagagtaaacaatctacagaatgggagaaaatatgtgtaagctatgcatctgacaaaagcctaatatccagaatctataaggaggttaaataattgaacaaacaaaaaccaaataatctcattaaaaaatgggcaaaggacatcaaccagacacttctcaaaagaagacatacaagcagccaacaaacacaacaaaaaaatgttcaacaagtcaccaatcatcagagaaatgcaaatcaaaacagagggctattattgaaaagtcaaaaaagcaacagatgctggtgagcctgtggagaaaagggaatacttatacactgctattggaaatgtaaattagttcaaccactgtggaaagcagttgggagatttctcaaagaacttaaatcaaaactaccatttgcctcagtgatcccattgctggggtatctatctaaagggaaataaatcattctatcaaaaagacaaatgcagttgtacattcgtcacagcactattcaaaatagtaaagagactgattcatcccaagtgttcattaatagtggactcagtaaagaaaatgtggtacatacacaccgtggaatactatgcagccagaaaaaaaaaagaataaaatcatgtcctttgcagcaacatggatgaaactggaggccatcatcctatgcaaattaattcaggaacagaaaaccaaataccgcatgttctcacttacaagtgggagctaaacactgggtactcacggacataaagatggcaacaacagatgctggggacttctagagcagggaggaaagggagtggggagggttgaaaaactaactattgggtactgtattcaatacctgggtgacgggatccattgtacctcaaacctcagcatcacaaaatatacccaggtaacaaatctgcacatgtactccctgagtctaaaattaaagaagttgaaattatcaaaaaataaataaataaaagccattctgattgtgagagagctaatgtccccactattccgtcagagtaggacaaccaatgtgtaagtaacgtcatgggtgccttttgaaccatgtccaggacagtgacatcttattaaactcgccatcaatatcgaagattcaattgctaccgttgcattccggtgactacttttataaagacatggtgttatcaaaatattttgagccaacgttacaggaaaccaagcccaaaatgttgtagccaagaagctggattatacctgcagcaaacatctggatcatgttacacactggtcattgtttttatggcattttccagtgctcttgtctacttcccagaattaaactacccaaaaggggagatttaacagaatggcaaatacatttacaatcacaacctctccaaaatgaaatttcaaccacacttcaaagccttttttatgttggttgctttctctgggatatttgagaataatttgacaaagatcagtgtttgcgccatacaggagctttttctcactggagaaagaacagatcattccaatttgtcttcagaagataaataatattacttctaatgtccaagttagtatccctgaaaatcagccaacttaaactttcttcaatgactttttgctgaaaggtgtggtctggaagaaggttccccaactcacccctgactcccaactcaccctgcctcccaccttaaggaatgcgcagaacaggaaaagcagtatctggcttgaagcacttgcttagaaatggcccttgcaagctatagctaagataagagaggaaggaaagggaggagacagaagttactggctgaggcccggaaggtaaaaccttgaccgaatcctgtctttgtagcctgcagtgggagtcagacaataatatcaacacttcactgggtctccttccaaaagtaactctatagtacaacatgatgcttcaggtatagaaaccttgctcttatttgtttagccaaatgaaatgtgaatctaatgcatttgctttggggaaaataatttagattatgagcagtgcatctacttagatttttgtcccacaaagctggcaattcatttaatagtatgaactattttgacttctgtggtgttccagcatctaacctcaacccttacttctagccatacctcttagttccaaccaaactgaaatatcctttgttgcatgtacagatcttgatttttgactttgatcacacgatatcctactatatcccactccgtctcgttgggttcagggcgtctatatttttcaaaggtctagttccttcaagtcttcttcaattcagttttcctgagcaaatactgattgatctttttgctgaacaaaatagacattgtcctcatgaagcttactcttttaagccagcagtaagactttcttctttgaacatctatagcacgtgattttacctctcctatgacacaaccttttataccttaaagtaacttatgatcataccgtagttcccagagaagactgataagaacatgacctcttacggctcaacatacctcactcagtaagtaatagttgaatgaatatgaaaagcataaaaaggcctctgaataacaagtccaggaattgacaccaaagagcttattagctaaacacttcttagcaaagatagtaagtcaacttagcactggcttacaactactttgtagcttatgatagagggattccaaagaagagaaatgaatggactgaaaactttctaaactaaccacccttgttgctggccagcttcgctgatttcctgagccctgaggagctgggcacctagcactggggaaacaggaggagggggcagatgtgtaaagcagaagctttcagtttaccacagggaatataataaacaaacaaacaaacaaacaaaattgtggttcaatggagtggttgaataagtgtgagtgaaagtattaaatattgtcgagcagaggaagtgaaaagcataattacttcgaaagaactaataaagagattttttcaatagaaaatgaatattaatgcagttgactctgttaatccctcaaattctgaaaaccttatacaaatttaataaaagaaataaatgttgtaaacagattaaatgtaattctcttcattaaatacgaagaacttatcctacttttatgaattttcatattagaaggtcagcatttttcctgccataaaacatctttaaaatggtaactcctagacagccactaatttgcatttcaataaacaggctaaaaatgtctacagaagttatggtgactcttttctagcaaggttgaatgagaaattcaattcttttaatactcaggtgcaacactgaagaacatcatttcagttgcaatatctttttgagtatcaaaggtaaatttcagtgctatatatacatttcgtattggaggctcaggggtgagcctgcgatttttgtcataggacgttagagacacaaaaacattttacaaagaactttgcttttagcttgcattgttttgtgaatatgaactgatgcaaagaccacgtgtgtaagacactttatacctgaataaccaatgaaaggccatttggggctccatattaatcacaaacaagaaaacccactttgcttcgttaattattagcagttcttactacgaataattagaagggaaaccagatgcccttctcttataaacaagtgtctatctaaatcaacgaacctgtacagattagaccctgggtgaattcatgcttctcaaaaaccttgtgtttgacttcagtccaatagctcagtctaccacacttgtgaatctcccaaagaacgaaaacaaagctctaagttttttttattcacaagagggaaaaccaggactatttagaaagcagaagatggagaggccactgcctagcctatccagataagtttatttggatatagtttactctatccagagagtcaaatcccctaaacacgagactgctatttccaaggtggaaagggaaagaaaagaaatgcaaaaggtaaaagttaaaggaaaaggaacaaaacaaaaccgcgtgcggctggaagtgcgcgggtttctgccgtcgcctcgcggaaaaggcagaagcgtctgcaaaggtccttctgcaaaggtcccggtccgtccagctcaacccacgttagcccggaccgtgacccaagggcagccccgagcctctgaccctctccgccgccctccgtcactgacctgcgtagacaaagagcaggaccaacttcggaagcaagacccctggacgcacgggtagcctcggagcgtccatccaagccggtggcctgaggcttggagcgaagggagagcccggaaccggagggaatggggaggatggagggcgatcagatggagagagcagcgctcctgagagccgggtggagcagagacccggccattgcctagggagccttccaagggagcccgggccgggcgcgtcccgggccagcgactgcgggactccgcggagctggggcgcccgtggcccgagacgggctgcgctgggggcccaggtctctttgtctcgccccactgcgctcaggcgcggggaaggcggccactccggcgtccttggccacccaggctcacatttcatctccgcgggtggcaacgactgcgggcagggggcgggggtggccccgactcctccccaagcccgggttcttccttctaaagagtgactaggggaccaagaaacttttcctaaccccttgctttggcgattgctatggagttcagcctgctcctttttaaccttgcctccactacaatttttcctttctaagcaatggatgaacaactttgctttttatctttaaacaaagggaaggaattttcagggttgaaggtattcgacaaagagtgacagtgaagaaaactcaggattgggaagtacagaaagtgtatggcatctctgctgaaagctgataaaatgtttattattttttcctgtaaattcagaaaaaaaaaacacaacagtgcacactgtcgttatgattttgacgttttggagttactggcctatgcaattaaacaagagaaagaaaaagatttatgaaaaatgaaagctaaattgtcattagcaaatgaaatacgtgtatacatggaaaatcaaagttaatcaactataaagctcttgtttagcaaaccaatagttttctttcctgcaaacaaaaatcagaaagttctcaatgttatgcatgaaggaaaaaaaatgatacgaataagtaaagagatacttttttcactaagaaaatttagtaggataaagacaacaagattccccaaattattatatacatttggaaataaaattgatcccaatttttaaaataacatgatttttttcaaaccaatctgattctaaagtttatatggaaaataaatatgtaagaatatctatttaaaacaagagtaatgaatgggaataatgaatgggatattacatataatatcacaataattaaaacagtttagattaacattggaatagataggcttagtgaaagagaaaaggtaacccaaaagtagacatgagtatgtacagcaatttaatttatggtttaaagaaatatcaatgtaaagtagtaggggaaatgatgagttactcagtgaaaagtgttgaggccgtaaatagccatctgtggagccttatctttttacatcaaaatcagttctatatgaattacatatttaagatacaactatgaaaatattagattaaaaaataagaggataacattcaaataattgtggaatagggaagccttttctaagcattataaaaaactcagaaaccataaaacaaaatattgaccaacttgactaaataagaattaatacttccagttggcagacatttaactggcaaaaatatttgcaatgcaaagtcctaatctcattattatactgagcttaaaaaaatcaataggaaaaacaaccaagagataactgaggaaggatattaatagacacttcatacaaaacaaataaatataaatatagaaataaaattgacagtgagacatcacttttcatgtatcaaaccaaccaaatacaaaaccaaatgaactcttaagggaaacggtgtggttatatgtacgaaaattcaaatacacatgtacttaatttagtcagttctcttccaggaattttttcctgtaaatgcagtgctgcaagggaatacgagagtgggaggaaacatcacccccaaaataaacataagctaagctctttactgtgttttacacgttggtgaaggcccaaccatccaccatgttctaaagaaggctgatcagttccaccttttttctcatcctcgctggccaatctatcaccaagttcacctaatctgtccacctgaacaccacccaaacgcattttaaattatcatctatttctgtcctaatctagacttttatagtcttgattatattcagcctccctgccttcagagatgtttgccagactgaagctggaatatttcttcttaaactacagatttcatcatgttcactcactcagtagcatcctgttgcccttaggttaaaattcaaacatttaatccagggtgttcaagaacttgttcactaggtcctgtcattcttgtagcctgatcaaaacattccactgggaagcacaatttctaaataactgggacaatggttggaacctagagaaaatcccaggcatacaagccctttgagtcttgaaggaagaagatacagatggaagtcagtgtttgcagagctgaagaatggtatccagcctgcttggaatagaaaaatgattgtctttgcagatgagactgaatacagatccttgatgggctggtagctgtgatagaagaaggggcttctcccgcccactttttgacacagatcaggaagaggctggctgttgccactgaggcccataggaagttgcagtgttggtcaggatagtctctttcagcttacttttgagaacagaaagacttctcatacagttcaacagattggtcgagcaagcttgcctgcaagtgtaccttccagagctgctaccttgaagtatgctgatgctcaggaaaccaaactcaattgacatggaaaggcaaagaaagatggcaagccatttaagaaattgtggtagttaaaagaaaggatttgaaggaaaaaaagatgtatatacaaatatgtatggaatgagaaaccttaagaatacaacatcagaggaactaaaagagttcctggaaattaaaataaatgtggtttgaggttttaaaatttacagaaaaaaattataaaatagtcacattaaaaaaaaaaaacttagattgttagatcaggccaggcgcggtggatcacgcctgtaatcccagcactttgggaggccgaggtgggtatcacttgaggctaagagttcaagagcagcctagccaacatggtgaaacttcatctgtactaaaaatacaaaaaattaactgggcgtggtggtgtgcaccagtagtctcagctctcagctattcgggtagctgaggcaggagaatcaggaggtagaggttacagtgaggtaagatcatgccactgcactccagagtgagactctgtctcaaaaaaagaaaaaaaaaattgttagatcaaataaggagtatttttcatataacagaggaaaaaaaacacaaagaaatagaaaccacgaataaaaatataaaaacccaaagaatgggaataatgtgcaggctaatagtttccagagaaacacaaagtgaaaaagcaaacgtcaaagaaataatgttttaaaattctgagctgtaataaaatttgaattttcatatttaaaatggtgagttagttccgagaaattttttttgaaaagaagcacaaatatgtacatatcttagagaccagtttcaacaagtataaatttaaaatcatatacattttcatatataatttttatgtttccttgaaaaagagaatctgacaggcatcagatttctcatttgcaaccctggaattgaagagggtgaaactatttttaacccactgaaagataaagaatgcaatccaagaatcctcttctaaatcagattttattaatatttctgatccactatgacatctagaacaatgtttattacaattttaaaaaatagtttacatgtacaacagaggtaaaacagttaagtaaattagggtatatccacattatgaactcatatctaatgtttaaaattgttgaaaagatctttaagatatatagttaaataagaaatggaatacaaaatgatctcaacagtggaaaaatgcagctaatgttttcatcttttattgaactttctttttccccactttcttcctgggtatctctttttttttaaaaaaaaaagtacctctgaatgaggtatatgctgaaattttaaatgcttgaagatgattaaaaagctataggtgaaatatgacaagtaagtagttttaacttatagttttatttaggaccaaaaagttagaataggacaggactccacagattgtctaggtcagtttcccagtttcttacgtaagaagactaaggccaaattaccaagtcagttagaggcaggctagatcccatggcaagaggccacatagcagattttgccatgatgtgatagagtgtgttcaagtttgatgataatccccttttgagttccctgacccacatttctctcttccaataatttatttcaccatagaatcaaacggattagtataatgtcttacaattaattaccttttaataaatacaacaaaaacattttatgtacacgcaagggctctacttgtatctgttcttcatcttcatttgacgacgtgtgaatgccaaggaaaaaaaagtacttatacagaaacatgcaaaaaccccagaagaaaacaagaagaaaaaccatgaagaaaaggggagatgatttaagtgtcgcatttaaggtgtggaaggaatatcaaatgtttattatgtaccaagtccatttctaagttctttaagtttattcatgaatactctcaaaatctcagtgaggtagatactattattatcacctctatttggatgaatacaggtattgagactgagagtggttaagtaactctgcccaaggtcacacgtctaactgccatgagagtgtgtctccagagcagagcttctgcctgcacccatcaaatgtaaactgtttttcaaaatagctttgcttggttttgactatgtaaaaaacagaagataatacgttcctatgacctttctcaacagcaatgtttttattagcatcaaaaatgctttactgaggcacctcctctgtgcaagacctagcatcaagtgtgggatggtttgaggaaataactttctttttaaaaaatgatttcaacttttattttagattcagtgggtacatctgcaggtttgttaaatgggtatattgtatggtgctgaggtttgggatatgggagatcccatcgcccagattgtagtgaacatagcacccatattcttcatcccttccttccgccttctataagtccccagagtccattgttgccggctttatgttcatgagcacccaatatttagctcccacttataagtgagactatgtgctgtttggttttctattcctgcattaattcaccttaagttatggcctccagagacatccatgttgctgcaaaggacatgattttgttgtttttttaattttttatggctgtgtagtattccgtggtgtataagttccacattttctttttccaatcctccactgaagggcacctacgtttatttcatgtctttgctatggtgaataatgctgcaatgaacatatggatgcatgtgtcttttggtaaaatggtttattttcttctggcttggatatattcccagcaatgggattgctgggttaatggtagttatgttttaagtccttttttttttttcttttgagatggagtcttgctcttgttgcccaggctggagtgcagtggcacaatctcggctcactgcaacctctgcctcccaggttcatgcgattctcctgcctcagcctccagagtagctgggactacagatgcccatcaccacacccggctaatttttgtatttttagtagagatgaggtttcaccatgttggccaggctgacctcaggtgatctgcccacctcggcctcccaaagtgctgggattacaggcgtgagccaccgtgcctggcttattttttaattcctttgagaaatctccaaattgctttccacagggactgaactaatttcattaccatcgacagtgtataagtgttcctttttctctgcagtctcatcagcatctgttgttttttgatttttcagtaatagcccttctgactggtgtaagatgatatctcattatggtgttgacttgcgttcctgtgatggttagtgacgttgagcattttttatatgcttgtttgctgcttgtatgtcatcttttgagaagtgtctgttcatgtcttctgcatatggctagccagttatcccagccccatatattgaatagggagtcatttccccattgcctatttgtgttgactttgtcaacgatcagatggctgtagctatgcagctttatttctgggttctctattctgtttcattagtctatctgtctgtctttgtaccagtaccatgctgttttggctactggtagccttatagtatagtttgaagttcggtaatgtgaggcctctggctttgttctttttgcttagaattattttggttgtttgggttcttttttggttccaaatgaatttgacaatagtttctttctaattctgcaaaaaatgacattggtagtttgatagaaataggattgaatctgcagattgttttcagcagaatggtcattttaacggtattgagtcttccaatccatgaacatagaatgtgttcccatttgcttgtgtcatctatgatttctttcagcaatgttttgtagttctccttgtagagattcttcacctccttggttagatgtattcctaggtattttattccttttgtcactatggtaatttggattatgttcttgatttggctctcagcttgaacttaattggtgtacagaaatgctactgattttcataccttgattttgtatcctgaaactttactgaagtcatttgtcagttagttctaggaaccttttgatggagtctttaggctttttaaagtatagaatcatatcatcagtgaaaagagataatttgacttcttcttcttctctttggatgccttttatttctttctcttgcttgattgctctggcaaggacttccagtactatgttagataagattggtgagaatgggcatccttgccttgttccagttctcaaggggtatgcttccaacttttgccaattcagtgatattggccatggatttgttatagatggctcttactttgagatatattcccttgatccctagtttgttgagggtttttatcacaaagggatgttggatttcattgaaggtttttttcacccctgttgagctgatcatatggtttttgtttttaattctgtttatgcagtgaatcatatttattgatttgcatacatagacccatccttgcttcccaggaatgaagcctacttgattgtggtgaattaactttttgatatgctgctccatgtggtttgctagtattttgttgtggattcttgtgtctatgttcatcagatatagtgtgatctatagttttcttttttcattgtgtctttgcctggttttagtatcagggtgatgttggcttcatagaatgagttagggaggagtctctcctcctggatttttttgaattgtttcagtacaattggtaccagctcttctttgcacatctggtagaatttggctgtgaattcatctggtccaggtgatatggtttggctgtttccccactcaaatctcactttgaattgtaataatcccgatgtgtcaagggcgggtggggcctaatggagataattgaatcacgggggcagttttccttataccattctcgtggtagtgaataagtctcatgagatctgatgattttagaaatgggagttcccatgcacaagctctcttgccagctaccacataagacatgcttttgcttctcctttgccttccaccgtgattgtgagaccccaccccccagccatgtggaactgtgagtccattaaacctctttcttttataagttacccagtcttgggtatgtctttattagcagcgtgagaatagactaatgcaccaggggttttttgtttgtttggcaaattttttattactgattcaatttcagaacttgatataggtgtgctcagggttttgatttcttcctaattcaatcttggatggttgtgtgtttccagaagtttatccatttttgttcataatagtctccgagaatcttttgtatttctgtgagatcagttgtagtgttacctttgtcatttctgattgtgcttatttggatcttctctttttctttaacttagctagtggtctattgatcttatttatcctttcaaaaaaccaacttttggtttcattgattctttgtatggattttttggtctcaatttcacttagtcctgatctaattttggttatttctttttcttctgctagctttgggttggtttgttcttgtttttctagttcctctaggtgtgatgttagatcgttaattcgagatcgctctaactttttgaggtaggtatttggtgctataaatgttcctcttagtgctgcttttgctgcatccaggagattttggtatgtagtgtctcttttttcatttgaaataaccttctttaaagtttctttgaagatggttttgatgaaatcacaaagtaactattgatttagcattttttctcccacaactctatgtcacacaacaataatcaaccattaacaatgatttttttaaatacagtttagaaaaatcatcttcacatgtgtaatatacttaatcattctaacaatcctaaaatgtgctgtattaccatcgttgttacactatggttggaagtatcagtctgaaagtttagtgtgcatcagaatcacctgcagggtgtgttaaaatagagatcaccagaccctgtccctgattcagttggcaccaaataatttgcatttctaataagttatcagttgatgcagatgctgctggccaagtaccgtaatgagaaccactgatttagaaaattctgactttaggaatattatcccttgtctctagctactgctaagaggaaaaagcaacttttaaatccaggttttacttatttatttatttatttatttatttatttatttatttagatctcatgtccactttagcataccactgtttctcacctttgccttttcaccaaggttttgttcttaaggcctcaaaattgttcttaaaattatcctttcaatgtcctcagcctaacaaggatttataatgatgatcttaaaatcaaaagttggctttgagtttgtggctactttttcttttaaatatggccatattagcttttcaaaggaaatttgggagacagttcatattcaaaccatgtgctttgatatattaattttgttgaaaaagtctattatagggaaataattttgttttcattatcaatcttggtggcataaatgctcttaaagattttagcttaagaacttcatattttttcaggaaatatactacaattactactaagtacgtgatgtgtcctattttatttaattattttaatcagctgcttcatcattttttgtttgtttgtttgcttctggaaaaacactccaaaatcggtccctaattcaaagaaaaaggacaagatggaagcttcactgttagaatatttttctatgtatcctattaattgtgacatttgcattcactccgaggacaatgaaacaatggcatttgtataagcctgtttttaaattttgtttattactttttatttggaaatctcaaatacaaaatttgaaagagtggtataaagcactcacatattttttactccgtttcacctattagcgttctatctcttttgccatttgttctttttctctatctgtgcacatattactgtttttctgaatcattcaagagtaagttgcacacattgtagctctttccccctaaatatttcagtatgtgtgttaatctgttggaaacttccaacctatatttgctaatttttcctttcctaccaatatgcaatctacagggagacattaagccgtgcaaatatcctgctcttcagcaaattttcctcctttaggtttaacacacattagtaatttttgcttgaagcaatctttactgttatggatgcaaattatcatgttttgaactccagctttccctctgtctattcaccagttgttgctcgtcattcaaaataagaatgcctctccctcattgattgattgattgtgagtatggacttaagaattcctactttttcaagagtttataattcattaatcttaaaatgtcccattttgggccagtggagcatcttcaagctagctattgtgtccttgtgacacaaccccacaagtgttttgggaatttcttaactttttgacataaaagatatcccaggttcattttgaatcttctctgctccagccctgaaatcagtcatttctctgaggagttctgggtccttttagtggataatggtcttagagatcaaagtaccctagaacttaaagtataataataataaaaaaaaagaatggggaaaagaaagaaatcaaagtgcatgttactgctggagtgcctttgtatcttgtctctttcagtataagagctaggaaatatatgcatgttttacacacacacacacacacacgggcactcagatatatatatgtatatatgtagctgtgtatatatatatataatgtgtatatatatatatcatcaccatagggctgttccttgacttctctcactccatatttgtaactctttttacacttgctatttcttcactcactcctgtaatacatctaaaacagtttcagaattgaattgctctgtccataccacaacataaaataacaatacaaaaaaaaaacactaaaaagaatttagattgtgctttcaattaattctccccccaactccacccaagactgagggcgtatagtcagttactgtgttcatcacttacttgagttagtgctcccctacccctgccaactttaattcacttgaaatgcatttgggttcatttatttccatttgctttcggttttacttaggttgctgctattggtgctgctattgtttgctttgttttctctcccatcattgttgacttgttttttgaatatgtagaacattagagagcttctaaaagtaaaaaaaaaaaataaataccaaaggctatattcagggaagtgttaatccttcccgtatgcctccattccagtctccctgttcctctaacataaccggtggtcatgattttctagtttctctctaatgtgtttcttttttaataaagataagcagattttttagtagcttgttgtggtgatatatgcaaagcaattctgaaattattttagatgtattataggattgtggaatgggtaacagcaaggaagaacctcgtggtgatggattgaaattagagttattggtacagatttcattatttccctttccttcttacacggaagatagcatactgtatatgttcttttgcactatttttgttttttgtttgtactgaatgatatatccaggagatcattccatatcagttcctagagattgtcctcattcatctattgttgctccatagtttacacgaaatgtgtaccattgttttctcatatgtttgaatatttacttatcggtatttgcaatagcaaataatgctgcaatgaataaccttaataaccttgaaaatatgtattttcttgttgttggagctatatctcagggtaaatttgcagaagtggtaacgcattttgctaaatattgccaaatcctgctctagagggactgtgacattttgcattcccagcagtaatgtattccttacaactttgcctacataatatattgctgagcttttggattttttctttattgccaatttgatggaagagttgatttttcttgcatttctcttatgagtgaaattgaacatcacaggactgttagttataatctttttgtgagttacttattcaaatctttgcccatttttctttaggattttggtgtttttccctcaattttaaaaatttctttgtatattagggatgttagattttttaaagtggtatatgttgcaatttctttcacttatggtgttcatgccatacaaaggatttaattttaaagaggtcaaatgtaataattttctttttgtggtgcctgggttgtgaagttttgggcagaaagtctttttctactctcagattgtagaggaacttaccctcaataataatacttttgcagtttcatattatacatttcgatttctgtgttgttagatacataactccgtagggtagcaggatatacattagcatgtaacaacaaataccgtttaaatagatgaattataactaggtaaatgtatgtttcttttgttggtgagaggttctatgtggagatttgaaatctgatgactatcattgttttccaattgaaggtctgatgcattgattttaatacaactggaaattcttctagtggatgatatcttatttctgcttgcagtacagagaatgatatggaaaaactaatggaatgcctgtttgcttaaaacatggaaatttattctgtagtaataaacaaatataaatgtcattcatattatgacaattttgtctttttggaacatacaaatatttcaccatacaaagagaaaaaaatgggaaacattctttgtttaattaaagcaagtctcccactctatatgtttgtaaaataacactatgttaatttgaattttgcaaaaggaaaagtatcatccatcttaccactatttttcttttcttttttgacggaggtgggttactttcttatttagactttataggcatacataacttcacgtaattgaagcttacataatgtttgtataattttatcttctttttaaagttaatattgtatcctaagcatttcccatatctgtgaagcctccatagttgctattttccatagctgcttagtattccaccaggttgttttagctattttactcagctctcccttcactgttggaatagccttcttacttatctctcaatttccattcttgctcatatccaaatagttttccagacattacttgtgtaatctcttaaaagtgaaaatgtattccaatcctccactgacagaaactttttcagacattctcattagactttgaataaaattcaaactttttaccaaagcctaaagagtcacacatgatttggttcccttctgcctttctgagttcttttccccctaaatctgaccacgagagcctttcagaagtactgatcgtttccttgccacatgctgttttatttctctgtagcaatcctccccacaaatcttcacctttagatttcaccttaattatcactttttgtcagagatcacttcctggctcacactctctcattctcaatcaaaacattatattggtttaacgtgccttctaggtaattctgatgagaatttgagaaccactagtctagaaaattgctgtctaacaaaaatatgtgagccacataggtaatttaaaatttttcatagccacgttaaaagggtaaaataaaagaagtgaagttaatttaacaatgtcttgtatttaccttgattaatctgaaatatttcaacatgtaattaatttttttctttctttttttactgatccaaagaggaacaagtttcaacatgtaattaatataaataattattgatgaaatatattacatggtttttaacacaaggtcgtcaaaatcctgtggggttgtttgttgtttggttttttttttttttttttttgagacggagtctcgctctgccacccaggctggagtgcagtggtgcaatcttggctcactgcaagctccgcctctcaggttcacaccattctcctgcctcagcctccctagtagctgggactacaggtgcccacccccatgcccggctaatgttttgtatttttagtatagatggaatttcaccatgttagccaggatggcctcaatctcctgacctcatgatctgcccacctcggcctcccaaagtgctgggattacaggcatgagccaccactcccggccctcctgtgtgctttttacgcttacaacccatctcaacttgggcactaaatgtttatcaaagataccagacctatatttacatttcaaaaaatgtacatttgaaaaagtagattcacatatcagaattgcttcaattctacttcagttttccagtaactgaagtatttttaaattaaaatttaaattaattaaaatgaaataaaatgaaaaatttagtttatcagttgcactattcatattttaagtagccatgatttaagccatattttaagatgcatgtggctagtagtgaccatattggacggtaccaatctaggtaatactaagattatgccatgaggctgctcaagtgaggactccacatcttaggtaccaaagatcattatgtgaatggctattgctgctccctcttgggcctggatgactttgccatgccagtccacacttacaaaaagtagactctttatgctttcatctccatgccctttcatttgcacttaatattgtaacaatgcattggataggaagagccaaaatcatgcctgggctctagttggaactctgagatgtggagcttctggaatcttcacgggggtggcagtcctccttacctggaaaatttgcaagacacgggaaaaaaaaactcaaaaagtgctgggtactcaaagacatatttcctatatccactgtatgtgcctattattttgtaagccttcaaaggcagggaccggatccattctgttcatggctgttttatcgagagctttcaacatggtttggcttctatgagtgtgcaatgatttttgctttaataaatgaatgtatgatttacaccagggaaagcgaactaatataaaacatatgttcgtttcggtgtctggggaaacttagtttcaatcttacactgttgtggagaagacatatacttatctatttgcttttaacctctgctactgccaagactgtttttctgatatcttccagggatttctctggacgataaattaaaaatgaaacatgaatcacagcggagctgaaaggcaggatgaccttgagtacatagcaaaggatgattcagctggtgatttcacaagatatgtcaatcaggaagcttgcttaccctcgctctttaaaggaaaattgacttgacttcagtcataccgaagggaaacttcaggcagatgttttggtaccaaatgacctttttctgttgtagccttgttgattagattaggaaagggcatctgatcccagagtagtcaatccttagactagcaagcagtttacagcattacttggaataaaacgataagcttggcccatcagattagaatagttgagaattaaaattaggaaacaacaaaataatgagggaggtgacagtgggagctgaaaatgcagcgtgtgagagaggggagggcgtgcagctgtaccgagccatttttggcctaaattaatgagggaggagcggcgatgggcaaacagaaacaaggaagtagagaaaaatgtcaatttaaatgtatatatgtatccatacacatgcgcacacatatgtgtatacacacacatagcactgaatgttcccttttcctggagttgtatttctaaattttcatatgggaaacttttaattacgtcctctacttgtgtttttggctttgagtcagatgtctcctttttagtgagtcttctctaacttcctagtctaatcttgccttctctgcctcttcccctccaacctttatttctttggctggagtgcagtggtgtgatctcagctcactgcaacccccgcctcccaggttcaagcaattctcctgccttagcctccccgagtagctgggactacagacgcctgcaaccatgcggagctaatttttgtacttttagtagaggcggggtttcaccatgttgaccaggctggtctcgaactcccacacaccttggcctcccaaagtgctgggattataggcatcagtcactgcacctggccccatccttcatttctaacacaatatattcttattgtccatataacacttatcactatctgagttaacttttgtattgattggtttacgatttactgtcaattgctcccacatgaatataaacagcatgaaattaggagagtatatctcacatacagtactctatgtgcagtgtctccagtggtacctgatgttctttcagtgggaaatatctgttaaaagaatatgtaataaatataaatttgcagatgacataggaaacaaaattggtagactgaaaaaaaaaataccaagagctgcaaagccggtgagcctgtaaacagttatggaaatggaaatgaagattgtgtgaggatcacagaattctactactgagttccttagcactaccttggctcacttcattttccccttgtcctgggagtatgatatctttttcctgggattatgtagtaattcagggtcaaaagtattaggctatgtcttgccgcaaggttttgcaagttatatttttgttgatcagataaaatagagacgtttcttgcgtttgccaccggcccccctcctcactctggtaacgatactctcaagttctaaatcattggttctcaaccaggggcactttctccccaggacacgtttgactatgtctggggatgttttggttattacaacttgggcagggaagaggagatagggaccaaggatgctgctgagtattctacaatgcacagcaaagctccccacaataaagagttttgcagtcccaaacatcaatagcgctgaggttgagaaaccctgttttaaagtgtcatgctgtctaaactgactaaactatcattgctcttaagcagatgatatagtatcagatataggatttcatataggatttgccctcaagtcccagggttttctgtaacttataatagaagagttgggagaaatcaagttaatcctagggatgtgctatgggttgaatgtttgggtcccttctaaaattcatgttaaaactgcatcccaagggcaacagtattaagaggtagggtcttcagaagttgattaggacatgagggctctgctctcagggttgggattagtgccttttaaaagagctggggcaggccaagcatggtggtttacacctgtaatcccagcactttgggaggctaaggcaggatgattgcttgaggccaggaattcgaggtcaacatgggcaacatagtgagaccttgtctctgcaaaaaataaaaaattttaaaaatagctgagctaaaaaattagtgatggcacgcagctataatcctaactacttgagaggctgagaggtgaggatcacttgagaccaggagtttgagattgcagtgagccatgatcctgccactgtactctagtctgggtgacacagtgagaccctgtcgaaaaaaaaaaaaaaagagagggagctagctaggcttatttcctctttcattccttccaccatgtgaagacacaatgtttgtcttatccaggggatgcagcaataaaatgccatcttagaagaagggacagagtgccctggccagacaatagaacctcctggcaaattgatgtcagatttctcagccttgagaactgcgaaaaataaatgtcttctctttataaattacatagtcttaggtattttgttatcacagcatgaatgatctaagacaggatacttcctattaagtgggctgattgaccatatacatatatctactctcccgaacttcactgaagaagaatgaagaattaaaaatgtatcagttcataaggtcaaagaaataggagagaaaaagaaaactattgacaagagattgctgtgaattttggaagctagaaagtcggtcaaggtatagtacctgacctagagaaaaaaatggacaatttaacctgagtacttgtgaaaggtattccaattgcaatgctcagagcttgaaggtaccaggtaaaatggaaggcagcaataagaattggggctgagaagagaaggactgatttaaaatgggtatataaaagtgggtagattccagatctcctctgccatgaaatgccacttgcatcgcttcccttttcagctccctccctctccactcctaattctccctgaccaccacaagtacctcatgttcagactctggataatttgaacaagagactttctggaatcagtgactggaagcatgactgcactaatgtaagcagggggtgttgtggtatgagatggtggtatcgcactaaagccttgttagtcctggtagaccatgatgagaagctcaaaattcattccaaatatggcaggaagatactgagagtttcaagaagaatttcatgatcgtaaataatgaatggtgtagcattattgcattggtgccgtcgttgccacagtcagtgaattctcgtaagatctggttgcttaaaagtgtgtggcacctccccgcaacctccactctctctattgctcccatcctcaccaggaccctggattcccctttaccttcggccataagtaaaagctccctgaggccaccccagaagctgagcagatgttggtgccatgtttgtacagcctgcaaaaccgtgagtcaactaaacctattttctttataacttacccagtctcaggtattcctttctagcaatgcacaaatggtctaacacacctggtattgtccttgtgcttatgtcttttacaatgactcataccattgctgccttactaagagaagagatagaaaggacagcagacttgtgaggcgctgcttgtattactatcttactaaatgggattatagacttgtctactcatagctaacaaacagtagagccagaatgttaagcaagatcggaggacttcaaaacttactctctttccactgcaacccatcgtgccaattctgagatatggcagcctttacaaatgaacgttccagatgtgcgatattctgctttagtggatgaatagcctctcattcataacatttgatacaatcgatgtttcgtatcataggactaatgatcaacctaccttcaatacaagatgttcaagctgataaggaagaactcacctcttatctactgatattaatgcctctgctccatagttgtcaagtaaacatataaatcttctcttatatatttcatcttgattatgaacaagatattatgtaacttaatgtgtatttgccattttctatttatctgtgatcacacattttatatttctgtatcctaaagtgagaagtaagcagggatgcaatacttctctcttataaagtaaattcaaacctacagatgtaaggtggcttgtttactaaccacttagaagttaactgtgaaactgaaataaatttaatatattaggcctggtgaggtggctcacacctataatcccagcactttgggaggccggggagggtggatcacgggggttcaggagttcgaggccagcctggccaatgtggtgaaaccccatctctactaaaaataaaaaaaaattatctgagcatagtggcatgtgcctgtaatcccagctacacgggaagctgaggcaggagaacagcttgaagccaggaggcagaggttgcagtgagccgagatcatgccattgcactccagcctgggcaacaagagcaaaactctgtcttaaaaaaaattaatgtattatcctgcctatttcccacatcttactagagatttcaattttagtgtagaatcttctcccaggtttctactcccaagccaagatcagcttttcttctgatccaaggttggtccatacacttgtgttttgacttctacctccttctatctcttaattattatccccttaagatatttttccctataggtatctcttattccatattttagacttttttttcttctttggctcttttcttcagtatgtaaacatgattgcagatgttataaactgagaagctatgtagcatctttggtaattttaactgttgtgcgtaagtttttggcaaagctatatctccacagattttgttgcttctttgagagatatgtttctgttttatggatatacttttaatgtagtctgcttgtatactgtaatttattctttgagattgcatgtattcttgcttgagcagctgttttctggaatgaggatctcaaatgaagagggctttaataaagagatataggcacagttttaaattgatactgaaaagaactcataaaaggaaggacatttttatgtgtgtatgaacattttagggaattcttgatttcttaccagtggcattgtctaagacgaaatgacctagatgctgggaaatgactttgttgagaactgttgtgttcagatacgtttgtcctggtggggccagaggaagagccacatctctgtgaaggtgaggtctgtccttaagggagaagatatttcttcagctaatcaactaggaaaaatgaacatcctgtaacaagaagtcaaatcttatggtatagtgaaaggaagacatttttccccatttaaggtcttggggcagtgaagattaaactcaagggtatgatatagtcagggcactctgtagaggtatgagctggcactctgtagaggtatgacctggtagtgtcatgtttcttactgaagataggctagtctttacatatatgatatgagacatggattttatgatcaagaggctataagtccgtgtatcccatatggctagaaagattgtatgaccctgagaatgggcctgaacctggggactgtgagatcatctatatacagcagaagttgatagttaatctctgtgttgtaatttcattgaatctccagtaaggcctaaaatattcagtcttttcttggctctatgactgaaaatataggcagatgtgcctaggatgatgatagcagtgatgggcaccagtccaggtaggctgggcctggcagagtgtaaatcttatgccagagcatcagtgaccaactccatgagcaggccagcacatgtgaaaaaggctcctgggaaacttagagatataattggaagattattaaatggactcagagtcatggcattcacaggcacgttaccttttagattagagaacacaacagtatcttcaatagtccttcatttcccctcctgcctcacaataaaaaatacctcttgcctctaaccctgaaaatatgcagtgaaaaaataattattgtactctttgtaacctctgagggataatgaaattgccagaggaatggcagggaaagagtgatcaattaaaaaataaacccaggaattataagtggtaagttggatgttgatttttgaccacatttgagaaagcaatttttacgtaagttttggttagaatgaaagtggaaaaattagtgagtcaggttacaataatgggaaacagtagagtagacatcagaaagttaggattatagtcctgattaatgcttactagcagtggattcttatattattttaccattctgagtttttatttctttgatagtgcaaggagaacacttctatcttctctgctggtatcatagtaagaataactaaatgatatatgcaaaagatatacacacctatgttattatttctaccagtcaatggcctcttacatccctttaaatcatgattccctgactctgtgaaagctagacatatatagaaatatttaaaactattaatagtaatatttgtgccattttccatattatattgagacactagaatacaaatattttcaattgtacatttggtttttataatccagagttaaaactttatgcaatcaatattattatcctggggaatttagacaaaataataataagcattgtcatctatagaaagaagcattttcagttcatcaattgctgcagatccatattcctttattggattttcttagccacactataataaagtgtatatggaatcatctgtctgccaaaaggtaaaatttcagagcaaagaatttttgtttggaaggtagtagcaagtatatgaaaatagccatctgtattagcctgctagggctgctgtaacaaatgccatagactgggtagcttaaataacacaaatgtgtttactttcacagttctggatgctggaagtccacgatttagatgttggcagggttgggctctcctgaggcctctctccttggctttcagatgactgccctctcactgtgtcctctcgtggcctttccaccgtgtgcacatctccagcatctttttctcttcttagaaggacacaagtcatattgatttaagatcccatgctatgacctgatttaattttaactgctctttaaaggccctatctccaaatacaatcacattgagggtttaggccttcaacacataaattttggaggggacaccatttggtccacaacgacatcataagacaattttctaaggctgaacaaattagcaaaacctaaagtacattaataatgtatagtgacaaatctaaaacctaatgccagctaatggcaactaaaagaataattagcccatttgttcattttctttctgggtgtggtataattaaagaaaattattgattcataaaaaatacttagcttcaatccaggtgtgaacatgttggctgtgattgagtctctcttataaaggcgtaattcatgacattaaaatatgaaatattaaaaacattgattcatttattataatcaaagtccaagattttatttgaacccacataaagagaggacaatttaggaatatttaggttgtgatataaagtaccatagaaatgactacctgtgtgttaatatgagattatactggtagaaaagagccgtacctttggggatgttgcttagtctctttgacagtcagtatcctcaatggcaaaaggaagaagttttttagtgaagaccaaatttctgatcatctcaaaagcataaacggttctctgctgggtgtcagccctgagtgaggttaagaggttttttttgagtttagagtggtggggatggagaggaagcttcttcctcactcaaggaagatggactattaatatgagaccttacttgggggcacttctgcaagtgggcaggtgaccttgtgcacagatgggtgcacagatggtcatggctctgtcttctgtcacttatccgcagtggcgaaaagagatgcactacgatcgattcatgcctacaggaggagctccttcacccagctcgactgattttcttttctccttgagatcttttggtaaaattagtcgtgtttgttctccactgagactggactggccatccctctggaaccctggcactgttgtcttttgggtctctttttcttctatgtggtcagtggtaagattcaagtttgagatttatgaaatgacctggcctagtttatcagtaatcccttcattagagtttctgacataaatacagtcatgaaataagtaaatagcgaccctaactgaaagtcatagcacctatgagtataacaagaaagatgatctctaaatcattgataggttgatcatcaaaatgtcaagaaaaacatatttactttatttgaataaactttataacatttttctctataaacactctattcctccattaatttacattaaacataaagaattaggtttgaaaggaagatattcgacagaagtcaaatatcactgcaaccctgtgtgatggggaactcaatctatttccacggtagttttaattattttcatggtagttgacatctcaccaacggaagtaacccaccactccctcaaattaaaaaaaataaaaataaataaataataaagtgaggcagggagaaagagagaggtgttttcttctctgggcataagctggtttgggataaagcattttgtgaaagggtacattttataaatcagcaaagagaatatgagaatagctcatggaaaattcagactaccaatcactctggcgattcacaaaaacgtgctgaagatccacctggggcacgtgattgttactgcaaattcagtaaaagtctgtgacctgcatttgtttttttttttaataagaaatattcacatcaaaccaatggtgcaaaattaatgtgtagggatatgcatattttaatctgttaaataataggacggaggatgacacattttgcatacattgctgactacattcgtgctttctgccaccattctaggaaacaaagctggcttagatgagtcattccttgcatttatgtttttctgtgactattttgctctggattcaagttatgtgtcttttgttcagtaaatgcacttagaataaacattacccttaatgatcatcttgattccaagaatcataactgactgttattggttcttaagatggctgagattttattagctcattttagtggccctgtataaatttaagttaattgacattgtaggcaagtatgtgtttgccaacgtccatccttgcagatacgtttttaagcacccattccactttcagactgcatctcctcattctctccatcagaaagtgaacaggaaattaaaactaattttaatattatgcaaggcaaaacataattaagaaaatgtgtaaaaaattaaaaagctgaaatcctcataatacagttcaaagctaaatagaaaatgattttttaattatatgctcatttgagttatgtgccacagcctcccaagagagatgcctgtttaaatccaagtactgacctcagtgcttcattattacaccatggggtggtataaaaggaagtaaaatttttctccctctgccccctccctccttcttgtctgggtttgggagagagtatggtaagaatatggttctcactattcccaatccaacatccactcatcttctcaaggatgtgctcaatactggggcattgggttggggagagattgattattaaattgcttcttatacggaatctcaagcatccttcacgtttggagctcaatctgcccatcacgttcaattccttaacttttttagcagttcagcagggccagcaggtttgctttctgggcagtcaggtagctttcatctttctttggccagctaaatccattattactcacctgtctgttctccagcttctaaaattgtgttgacctgtctgcacttgtctctttactgctctctttatctgtgtgagattctgacttttacttttttaaaaatctctttgatgtcattgtggttagatttctgaaggcagcatgggaaaatatatctgtgcaatctgccattcttaaacagatgtccctaagacagtattttgaattagagtttagatttttgaaacaatacattttaaaaggcattttagttgagggcataaaaatgagaaaaaatactaaagcagctctcttttgcattactatttgcattaaacatgccttatagccttgatagctggggagatcctagaaccaacataagaaataaattcttgaatgtgtttataaatccttgaaaaaataattcacaagtatattatttcttcataaagtaggcagaaaatgaaacaaaccccaaaatcccaaggaaaaaagtaagcggtaattaaaaatctattattaaacagtgagaacagcaaaatttatttttatggcactgtggcaataatagaagtttttcaaaaagccatatatgtaacaatatttaccattagccagctacagaacactcccagttaaaattctagaaacttatctgatattaattctttaacaaagaagctgacatagtaatgttcttggtaagaatatggtccctgaagttctcaatccaacattcgctcctcttcccaaggatgtcctcagtgctggggcattgggttggaaaaggatcttgtaaaaccacatggtacaggctttcatcctgttttactttaaaaaaaaaagaaagttgggatcctctttctaggtctcagctgaggttaaagaaaaagtttgcgtattaaacaccatcatttaatgactataggttgctggtgtgctgagctaaaggtaatgagacacaagacaaaaactctggtttaatcacagtattttccatgttatttaaaattttaatcttaccacaaagtgtgaatctgtcttcaggagtaaaactcaagcaggccttaaacttggatgggtctaggaaagagcccagaatattgacccctgcctgtcaggaaacattagaaacattatgtggttgctttacacttgatttatgcactagttgggcttgtagactctttccaaaagtctgaatttttccaaaaattcagtgatgggaagaaggggtggtgtgtgtgagtgtgtgtgtgtgtgtgtgtgtgtgtgacctaaaacctctaaataaatgcatgggaaacttctcgcatctggttgtattctctctcttcacagatggaagcatgaacagctgtgtttccctagctctttccatgatatttctgggaactgaaaaactgtacctctgtgtaatcttctccttatgtgactaaatccatacattcctatattttttgctgtcagctgagctattttaactgtgtttgttgacctctttccatcaagaacattaccattttattgtgctaacaatataccaccaccaccaccaccaccaccaccaccaatttagagttttcacggcattgggaacatctcactgggaatagatctgctttccaaaaacgtaaaggcttagcctacaaaatccgagaaaagttacaaacctgtactgttaggttaacatgggaagtagtaaacttctctattaagattctgcccttttatactttcttcattgtatttttttgactcattttgcattcgtttgagcattgggaatatcccagtatcatcttgggcagtgggtgacttccatagtgccagacagctctactgtcttggggaggtcttccgtgacacctcagctcgctgcagtgaagtgctggctcatgccagctgactgtgtttatctcctcccaactttgcatttgtcaaagagaagttgctaacatagatcaagcatggtgggagtaattacaccattggaattttccatcgctaccaatcagggcttttatcgtcctcctctcccccaagcaggttgttaaacatttaccagcataccactgttcccaattatctacacattaatatacattctgatatatttaaatgtgttatgttatagcataaatgataataaaaaatcaaaacgtcttttcaaagcaactgctccagtcttaaaaaaataccgcatgctcttagtatatacccagtacataaaaatagttacccaatataaatagtaaatagttatccagtcccttacacattgtatttagctgttggtaatgctgattcacataatgaagggcctggaagttcagctatgatatggttaggctttatgtccccacccagatctcatcttgaattgtaacccccataatctccataatccccacctgtcaagggagagaccaggtggaggtaattgaatcacgagagcggttcccccatgctgttctcttgatagtgagggtgttctcacaagatttgatggttttataaaggcctttccccccttcactcagcacttctccttcctcctaccttgtgaggaagatgccttgcttccccttcgccttccaccacgattgtgagtttcctgaggcttccccagccatgctgaactgtgagtcagttaaacctctttcttttataaattacccagtctcggagagttctttatagcagaatgagaattgattaatacaagctatttctgtgtctcccaagcattctagcttaaactcttcttacttactatactttctaaagggtcctcttaggaatttgttgaatcatgtgttcacttctgagtgggttagtactataaaagaaaatttgttattattgtaaaatatttcagtcataatacaagacacaaaggctgttacaataacctctcatgtactcacagcccaatttaaagaaaattaatggaaaattcccatctcttagcccacttccatttgtgcagaggtaactattatcctctatttgatattttcattcttatatcgttcttgatacgttttctacacctgtgctgttatttttattactttaagtgtttgaataaatagtataacattcttttaaatttgcttttttcctttgctcaatatttgtgagaattatccaggtagatacaagaagcccatgtttagcgattccagtgccatatcgtgttcattttaaggttatatcacaatgtattaattgttctgtttataagacatttatgctattttgactatttcataaacatgctgcttaagaacatttttgtatatgtgttgttatgcatgtatctgagagtttcttaaaacatataattaggggtagaattactagagagtgaagagtgcctctctagctttcttagatattgccacatgttgtctaaagtgataataatttaccttacatctagtagaatataagagttatagttgctttataatcttcctaaaatgtagtactgttagacttaaatttgagctggtatgatggatgtgaaattaacaaagtggttttaagtaaaaacacttaatatattattaaacacaaagtagcaggagaataaaaaatggaaaaactcaaatgtacttcaacaatagaatgtataaacaggcaataatgtatgcatacaatagaatatcactcggcaataaaatgaatgaaatactgatacatgagaaatatggacaaatcataaaatggtgatagaaatcattgtactgatcagctctgttattgtggggaactgcctgacaagggtgcaaatgaactttctgggttaatgtaaatgttctgtgtagcttgaaagttgggaattgttaacaggtgtatgtgtttgtcaaaattcattaaacagtacatttgaaggtatgtacattttacagaatgtaaattacacatcaattttttaacaaaagagtacaggaggaaagtgaaattgtgagatcaaagaaaaagcattgaatatgaacatccacaatttttcttcccactcccacattaaaagaaaaactccgttactgtttaatagctttcaggactttttttctatttgttatttttttttctttttttctttttcttttttttttttttttttttgagatggagtcttgctctgtcactcaggctggagtgcagtggcgcaatcttggctcactgcaacctccgcctcccaggttcaagtgattctatgcctcagcctcctgagtagctgggattacaggtgcccgccaccacacttggctaatttttttgtgtttttattaaagatggggtttcaccatcttggccaggctggtcttgaactcctgactttctgatccacccgcctcggccttccaaagtgctaggattacaggtgtgagccaccacgcccggcttatttgttaatttttaataaacacatttttaatttgtaatttttgtaggtatgtagtaggtgtatatatttatggggtacatgagatattttgatacaggcatgcaatgcataataatcacatcagggtaagtggaatatccatcagctcaagcatttattctttatttgttatacaaacaattcaattacagtattttttgctattttaagaattacaataaattattgttaactgtagtcatcctgttgtgctatcaaatactagattttgttcattctatctatgtttttgtacgcattaacgatcctcacttccaccatcccttccctctctgactacccttcccagcctatggtaaccatcattctactctctatctccatgaattcagttgttttactttttagctcccacaaataagtgagaatatgtgaagtttctctttctgtgcctggcttatttcacttaacataatgacttccaattccatctatatcgttgcaaatgattggatctcattttttatatggctgaatagtactccattgcatatatgtaccacattttcttgatccatttatctgttgagggacacttgctcccaaaccttggctattgtaaataatgctgcaataaacatggaatgcagatatctcttcaatatactcatttattttgggtatataccagcagtgtgattgctggatcttatagtagctctatttttagtcttctgaggaacctccaaattgtcctccatagtgattgtactaatttactttcccatcaacagtgtatgagtgttcctttttccccacatctttgccagcatttgttattgcctgtcttttggataaaaaccgttttaactggggtgagatgatatcttatagtagttttgatttacatttctctgatgatcaatgatgttgaaaacttttttcatattatttgtttgccagttctatgtcttcttttgagaaatgtctattcagatcctttgccaatttttaaattggtttattagatttttaacttcatatatattctggttattaatcccttgtcagatggacagtgtgcaagtattttctcccattctgtgggttgtctcttcattttgttgattgttttctttgctgtacaggagctttttaacttgatatgatcccatttgtcaatttttgctttggttgtctgtgcttctggggtgtcgttcaagaaacctttgcccagaccaatgtcctgttgtgtctccaatgttttattttagtagtttcatagtttaaggtcttaaatttaagtctttaatccattctgatttgatttttgtatatggtgagagatagagatctattttctttcatctgtatataggtattcagtttccccagccccatttattgaagagactgtcccttgctcaatgtatgttcctggcaactttgttgaaaatgagttcactttagatgtatggatttgtctctgggttctctattctgtttcattggtctatgtgtctgcttttatgccagtaccatgctgttttggttactatagctctgtagtataatgtgaggtcaggcaatgtggtttctccagttttggtctttttgcttaggatagctttggatattctgagtattttgtggtctcatataaattttagaattttttttctatttctgtgaagaatgccattggtattttgataggaattgcattgaatccattgaatgttttgggtagtgtgaacattttaacaatattgattcttccagtccatgaatatcaatttttttcatattttgttgtcttttttatttctttgatcaatattttaaagttttcattgcagatatcttttacttctttggttaggttaattcttaggtatttaattttatgtgtagctattataagtaagattactttcttgattatttttcaaattgtttattgttggcatatagaaatgctattgattttaaaaagtactttttatttcaacacttttaaggtacaagtactttttggttacatgaataaattgtgttgtggtgaagtctgagattttagtgaagccattacctgagctactgatttttgtatgttgattttctattcctcgtttttactgaatttatttatcaattctatttgttttttggtggagtcctacagacaataatttgacctcttcctttccaatttggaagccctttatttctttcatttgtctgattgctcttgctagaactatgttgaatcatagtggtgaaagtaggcatcttagtctttttctagatcttagaggaaaggctttgaatttttccccattcagtatgatactagcaacaggtctgtcatttatggcttttaatgtgttggggtatgtttcttctatacccagttttttgagggtattttttgtcatgaagtggtgttgaattttatccaatgctttttcagcatcaattgaaatgatcatatggtttttatctttcattctattgatatgatctatcatattaattgatttacagatgttgaattatccttgggtccctgggataaataccacttggccatgatgaatgatcttttaaaagtgttgttgaatttgatttgctagtattttgttgacgattttgcatcaatatttattagggatattgacctgtagttttctctttttgatatgtcactgtctagttttggtatcaggataacactggactcatagaatatgtttggaagtattcctgcctcctttactttttggaatagtataagtaggagtggtattagttcttctttaaattggtaaaattcagcattgaagtcattaagtcctgggcttttctttgctcagaaaatttttattacgtcttcaatctagtcacttgttattggtctgttcaggtttgggatttaatggttcaatcttgcccttatggattttccaatttattggaatatagttgctcatagtagcctctaatgatcctttgaatgtctgtgacattggctgtaatgtctcctttttcatatttgattttatttatttgagtcttctctttttcttagtctgactaaaggtttgtcaattttctctatcttttcaaagaactaacttttcatttgattaatcttttgtattgctttctttatttcaatttcattaatttctgctctgatctttattatttcttttctcctaattttgggtttgattttgctcttgcttttctagttctttaagatgcattgttaagttgtttgaggtttttctacttttttgatgtaggtgtttattgctataaaccctcttagtactgctttcactgtatcccataggttttggtatgctgtattcccaacatcatttgtttaagaaatttttaaaattactccttaatttcttcattgacccactggtcgttcaggagcatattatttaaatttccatgtgtttgtatagtttccaaaaatcctcttgtttttgacttctagttttattccgttgtggtcaaagaggatatttgatatgatttcaacttttttgaatttttttaacatttattttgtggcctaacatatggtttattcttgagaatgatccatgtgctgagaagaatgcatattctgtggctattacataaaatgttcagtaaataactatgaggtctatttggtctatagcgtagattaagtccaatgttcctttatttattttctgtttggaaggtctgtccaatgctgaaagtgaggtgctgaagtctccagttattattgtattgaggtctatctctctcttaactctaataatatttgctttatatatctgggtgctccagtgttgggtgcatatatatttcaaattgttatagcctcttgctgaattaaccccttaacattatataatgactttctttgtcttctattattatttttaaattatgtgtttcccaccacaatggaagcaactgcaacaatatagagagaaagaagttgagggagctggacagagagagaaggaacattgatagccactatcttgctacactgtgtaagattaaaagagagtctcggataaagagattttaacacattttgctcattgttaaaaatacagttcctctttaatgctttccaaaagcagcagtaaagatttaaattgcctcccaatctctcttggacattgcaccagtgtttcacttaaatgtattctctttgctgaggtagaccaggaaacagtgtttcctgaggcacactagcatcatatgttcaatcctaatatatttttattatcattcttaagacacatcagacaaattttagcattttgtctaatgtgtgacatcctttggttaatttattttaataagtgacagtctggtgaatttattttaaatgaattatacaagaaaagtgatttaaaaataaataaatcagtaacaatgaaatattttatttttgaatattaagtaatgtgttgtagtaaaacatgcaaaagtaactttcattatctggtatggaaaatgttgcaatttgtattttttcatgatttcatgttttgtttctagattagacaaataggcatataaagttattatttcaattatgctttgtaaattagcttcaggagtttaggcaatcattttcaaagaggcaaatgttaaattagaggcattccattgctgtattttgtctttttcacattgatcttcaaagttgaagtatcatttaaatgctagttacgagttttgatcagctggatataataacaattactctgaaatgaaatttcaggtttttgtgtgcttctcattacctgcagtccgaaatcattgttccttatgctacctgcttttaatgaagggtccagtatgggtatacaggttgaacatccctaatgtgaaaatccaaaattcaaaattcaaaatgcttcaaattctgaaacattttgagtactgaaaagatgacgcaagtggaaaattccacacctgccctcctgtgatggctcacagtgaaaatgtggtcaaagctttggagccgggctctattgtggccacaaccagcctctagcaatctgtagttggagctggatggatcttcggaggtgtgccaaatacagcgaaggtgtccacgccctcatggccttacatccacctttctctggatgccagcaggccctgggaagggagatgacttccatcaaggatcaagatggctctcctcagtggagggttatcacagggagggaggtgtgaatgggaaaactgggagtaagagggagcattcagcattgaggaagaagctcctcagtctagaaggagaatccctgggctaaaccagagcatctactatagagggggaggcacactatttagaggttgaagaaagatgcaaagtgtgataagaacgaaggagatgaatgaattggaggtaggtaataatgttacctttaggaagaaggaaaagtgtgggttagaacctaggactattatttatgagactgaaaagaagtttgctcaaatgagattttatactcaagtccttatttaatgttgtgatgttaatctaaaatatgattgtctatgaaccttgaatatgatccaatattgaacctgaatatggtccaatatatgtcagcaatataatttattattatttttgaaacaaatgccattttacataaaatctattacttcagtgcaactttctgcctttaaacctgttaaaaatttcctattgttgttatcattatctatcttccttatgtatgttttacttgtgtattgcaggttcttaatgaaaaattttctttcccctctgctctcctcttggaggtcataatgacaattacatatccttcgtgctcatacataatacatgaatactacagaagtaggttattgaagtatttcacttatctcctgtatcaccttttcatctgatgtgtactgaggagaaatttaatatacagatgttctcttccacttttaagcactaattgtaaatttaggttgcatatacatgaaagagagtttaaagaagtttgttaatttggggaataaatagtgtactagacctatattccagttctggctagatctgtattccactccgtgctctgctgtgaactttgtgtagaaccttgaccaagcagttttatatctctagtctcagttattatttgtaaagttcagttttgcattgtgtgatttgtaatgatatttttctgtgaaattgaagctgggctaagactctgtaggatcccgcattctttgactgttgactacatcttacattttctaattgttcacaatagtttttttccagagacatttttctttctttatgaactgtcgctcaacataggtaatttagtatgcaactaaatttcacattaaatattacactttcgcttggtttcataaatttaaatctagttcaaaactgtagtaggatcacttacatatacctctaaactcacatgctataaaatctaatagtttaattatttttcataattgttcaaaaactcctaggaaacttccattgccactgaaagaaaggaaaattcaaattccctttcaggcctgtttctttgtttcccatcctaagtcccaaatggaaggacagctcacaaggcgagggatccagacctatgtgtgaactgtgtgtcatcaggactcctaccatctctcttctcgctggctacgggcaccagtgcctactgtggtacaactggctcctctggatatgttgtggtttatgtttcctcccctgctgaagtctggggctggtgaatattttctgtgggttctactttataggtacagactctgttcttgtccatggagcgataacttctggctgctgtttccttgtgaggcataattgatggtcttcaggcactagctaggcatctcttccacagcttcttggcgtttgggatccagtggaatcttgatggctacttctacctgggatcttctggggacaaaatcccattgctttggagttccaacttatctttctgttttttttttaaatacccattgcataaacctgaacacaaacatatgaacatctcctgtatagtctcctcccagccccctcgccactcggagaagtgagtgaggtctctctcactcctctttccatctgagggacttctcctgtgtcaactccatcctccagctttccaaagtgggatgcaactttcatctttcctggaggcatgttgattctcaaaattaaggtgccttgagttattgaaatcacaaccttcccactcctaaagcatgtaatctcaaaagtgaaatctgcctggctgcgtcttgtgtgatggagaaggaaatgtgcctggcgggcccctttaaatctgatgggaatggggaggacattaggggttactgctcagacccacatgccaggtgactctgtgggctgctaggcctaagtgtgacctacagaaacttcctcagcaggtcctgcagggcaagcatttggaccttttgaagcaacagaatcaattttgcttgaactttctgtagctgactgcattgctctgtgtttcctctagcaaatctcagtatgagaattactgtgagccctctagggcagcatgtttcaaactgtgtgttgtgacccattactgattatgaaatccatttaacaggtctggagcaacgttttaaaaaaaatgtgaaagaggatagaataggaaggaaaatatcagcttccatagcctgtagtgagggcaacatttattgaaacttgtttattttgttcaagatcttctaagtgtcttgtactggcttagaaattaaaatacatttcttacagagtcctcaggccataaatttcaaacactacttctctaagatatatgagcaaagtcatgcctgcctgatcaaataacttgtttcctttgaaggaacagctctttccctagtacttggatctggaagatggagactgggtctgacactagaagaccatattgctcttcatgatctgggtgttatctgacctcctaatcaataaagtagggcctgaccagcatcacttaatcatcacacgaaaatggcatatatggtattagacaataaccagcccagaacacacaaataatagaaataagttgttctcactgccagtatacatcctgatgcataaagtgtcacctgccccatgacccacaactagagtcacatgtggagttccatttgatgtgttgactgaggggaaaaataaatggattccaggaacaaatcattcctttcagagttctaaaatcagctgtgagtaggtgtgcagtgttacatctccatcagggtacttctgaaggacagtggacagagtttgccactgggttgcccactttcctggaggaagagataatctaaataaatgttaacatgatttccttggttggttcgttggtctgggatttgaggagtagtgacaatgtttggggaagaggtatgtgggtgaggctagagtatggggttatttgtgaaacttacttctgaagagacagcttttaattaatcatcaggtggacaagatgaccatctctgtgactatcagtcagccgcatcttccaaaatccagcacttgtgcagtggttaaagtggcaaaggcagtaaaaacacatgagtttaacacttctttttaccaaggcttatctgaacattggaggccctatatgccatcagcagaaacaaaacctgagactctgtaggagattgtgttgattgtcccactcaataggtgtaccctaagagaagagagatatacatggaaataaagacctgccctttcttgctgcctttggatgttgttacaccacagcatgaagctcggggctgggcagtcattttgccacctagagagaagatccaagagattcttaaaaaaattggcttagagtcccagacttctcagagatcctgaacttaccaatccaaaattactgtgatgtgagaagataaaccttcattgtttaaaccacatcttatttggtgtattagctttatgtggctgctataacaaattactgcaaacttggcagcttaaaatagcacacatttattctcttactattctggagatcagaattccaaaatcagtttcactgggctgaaatcaaggtgtcagcaacgctgtgcttcctccagatactctagggaaaaatctgtttccttgtcttttccagcttctagagctgcatttcttgcattccttggcttgtggccctttcccccatcttcaaagccagatgtgtggcactttcaatattttctctccttcatcacattgccttctgtgtctgtaactttatcccctttgaaaattatagtatgggataacccgaataattcaaataatgccccatgttaaaatcctaaacttaatcacatctgtaaaatcatataaattagcactcatagcttctacagattagaacctggatatctttgggggccattaggaagccaaccgtattggatattctatcatcacttggaggtaaaagctttcttactaatagtccctccaatacggaagtatgcctggggtgtgggggactaccagcaattttccaaggctctaggttgattcctctggactccttccatcacaaaaggaaataattgatcttccctaacttatctcatcccggatttgtattttcttttgcttcctaccatgccatatgtaccttcatccttgaatttattgcatgtctaaaagctttcagcatgtgcaacattgtgggagctgacactcacgggattcattagtattatcacgtcccctgcaagttagaagcttctggtcttccagaataaagaataaccttattgtcacctagttataactcatctaggagactatttttgcaggatatagtatgaaccagaagtcaatatgtgctgttgattctcccattgcgagaatatattgattctcaaaatagggagtagaggtgagggtgtcaattctcatattacgtgaaatgtgagttcaatctcccaactctgggatgtttgggcttagaaattttagggaccaaggaataagtagacaaaatttatactggccatcacaggcttttcagctgctggataaaaattcaccaaaggagaaaaaagaagagagagcgagaagaatattcctattaaagagaaatgagaaataagattgcaatattcatcaatattgctttacttatggtataatgtatatttctatatattttatgcacaactcccccatccttgtggttaaaatgcaagttaaactatacattgaggaatgccaaaatcgaacagcgacagaactagagaaagactgcagcaccccagcgattctgcagatggttcggtttggtgaaaaacaatcactctgacacattttattgaagttacattttggttgataagttcaaaggacaaatttgcagcaaagcctaagatattaagctgggggatgttcagtgatcgtggcccctttaatctgtttaggtcttcattggagaagatcctgtcatagagttctgtctgaccataggaaggttctaccaagttgcaagaagccctggttggggcttacctagtggttcatccctctgccaagtcacatttaaataattacttcatgtggaagcaaacttgcatttactatatcacttcatgtggctctagcatccaggttccaggtacaatttctaagtatgcctctcaacatcacccactccattgtcacaagttgtattataatgaccaggcacctcacatgtgtccttttacttacaactacataactactgatgtctcctggacaatgagatcagcgagggatacacttctacttgaaaatatttcacatgaactagattgagtggacttctgaaagaatatgtgaaagcgaattctcctgagcatatgctactgtgagaactatttcatgctaatgtcattgaatataatatttctgcatgttagctttagttcaggagttcccatcctttactaaaccatgaacagctttggttgtcggctgaagcctgtggagtcctgctcagtatattattcctaaatgtacaaaataaaaatacatagaatcacaaagaacatcgataatattgaaatacaattatcaaaataatcatgtttttaaaaacagtaatatacgtgctttttaaggaatatacaaaataataagctctagcagtgggctgaaatctgctttaatttcaagctagttttgaacattaatgatagtctgtaacaactgtaatgtgatatgaaattggcagtaatttcttgaaagcacagatattgctaacacttctctggcttgttacctatatttttaactggaaaaaatgctaatctatagagttagtggttaatgaaaaaacaattatattttttccattcaagttcaaatatctctgaattttataaacaaatcccttgtttaagggacgctacataaattctgaagactttgacagatatctataggcagttcttcataagaagggtaccactataacaaatattacatttttaagttgtggggtggggggagggggagggatagcattagaagatatacctaatgtaaatgacaagttaatgggtgcagcacaccaacatggcacatgcatacatatataacaaacgtgcactttgtgcacatgttccctagaacttaaagtataataaaagatacatttttacatttattttatgggtatgtttcttacccacttctatacactgtttcatcaaaattcttacttttttggattctcctaagatttttctcttcctgaagttcctttctcagttacatatgtcatcagcagggttctcaagttccctcttctttcctcctcatttcatcatctctagtctatctaaggaagagtatttttttctttttcttctaacagtgaaagagaaagttgatctacagattgtatattcaactaaagattttggtccataattcatgtggcagtcaaacagaacctggtaagatgtgaacttttaccagtgatcatttctgtgtaatcgcattgttcattggccgtaacttcatttgtaaatccatttattaaattacatagtatattcatttcagtcttcagccattttttggaaaatctgaaaatactttataaatctaaggtttcacagtgactcacagacattacatttgtcagaaatcatatcatatataagatatatttattatcccagtcctctacaattaatgatatgaaggaaaagtaaatgcttgcatgaagtctaaagaaacgtagaagttcaatcattatagaaatccgtagagagctaatatgctggtaggttaaagaaagagtgaggtcatatgcaaaaagtttattggcagatttaagatttgtactgtggtgaaagaagagagagctgaagcctgggaacaggatgaagaaagctgtttcctgtgatacagggttcagaggcacactaacatggtaggtggaagagtgagaaaggagtgcaggagattcataaggagttaagctggtacttgtgatttgtgcattagaaaaatgttagatattgaaaaaaatgagtaaaatggaaaatatcagtatagagaataaatgcaataatctagtttctgtgtgatacaattaaagtttctaccttttcaatgatataaaagttaagaaagtgcttagaggccagttgcagtggttcatgcctgtaatctcaacaatttgggaggttgaggcgggcagattgcttgagcccaggagttcaagaccacctaggtaacatggtgacacaccccctctacaaaagatacaaaaattagtggtggtgtgtgcctgtagtctcagctacttgggaggctgaggtgggaggatcacctgagcccggaaggtcgaggttgcactgagccaaaattgcagcactgcactccagcctgggcaatagagtgagaccctgtctcaaaaagaaagaaaggaagggaggaaggaggaagaaggaaggaaggaaggaaagaaggaaggaaggaaggaatgaaggaaagaaggaaggaatgaaggaaagaaggaaggaaatgcttaaagggttttaaatagcaaacataaagtaaaagaaaaataagaattattaagagtattcttgaaccatatatggtaaccataaaattatattacaatgatatgtgcaatagacagactatattcgtttaatgtatatattaagataaataatatttgattacttttgatcctttaatataatagaaaaataatttatattcaaatgaggataatatcaaaattagatattgatatgtttgtttaacatatttcataatctttaagactggtttatctttagggactcaatttacacaaatgcctttggatccatttagaatttttagtcatttgccaattttcctgtatttcattcaagttggctattcctccatcccaaattcctccccagcaaccaaagttctttgtggacaagtacattcaactcttcttagaaagcgtaaaccttaacctacaaagctgtattttatgttcagaagctatacagttgatattatacatcttaaaatgtataaaagttcatttctgtagctattgcatagtttccttttaactgctttagttccattattatcaagcaaataacagaaggaaaaacatgttgtattggagggtctattaagatctatggtatgtatatacctgaatttcatagcttcttctgcatttctgtaattgtaattgatacaaattaattttagaaatctttttatatagaatggacatattacaaaagaattatttgtttagctggtaccataaaattttttcattagcttcactctggtttgcctgatgcatgatgtgattggtttaaaaacaacttcagaaaatgtctcacctaattatgcatttagtcaatggaccatgaaagctttaaagagactcattctagtttattgagtagttatttattcataatagagttttatcagtctcttgagtaaaaagtttagaatttcctcccaccaaaatgcacttacataattacaataaaactataatcttgaaaatgcagtttaacgtgaaaaccacatagatattagatagtcaatatctgaatactgagaagagacaatgtaaaaataatggaaaattttacttgttctaggaataatcctttaaataatcttgtaagtaaaaaattatttccaatcatcttatccatttcttcttccaccattctctttcatgaagaaaaaaagtgttttcgaagcaacagtatctggagggataatataaatacattaaaaaattattaaaactataaccactctctttctaaacttcatccttaaagcaagtgggaaagaagaaagaggccaaatgtttccctaagctgtttaatcatacaaactggattttagttgactcttaaaggagtgcctttgttggatttacacagtcatgtttaaatagctagcttccaagttctcagagtgagggtcaagtaatatgtttttaatttcaggagcagtttctctcggatttatcccaaatcctctaatgttgtatatttctttaagaaactcagttaagagtattattccacttaaatattgagccatcttttatgtccataaagctcctttcgaatgcaatcagacctgtgtgaggacagaggataaatggtacatggagaaaaagtgataatctgaccctcagcttttccattaaaaaacataaaatgcagcatttctgtgccttgtgaaaatgatgttgctatggagactgcctttatgaatcccaatgaaattgatattagcaacattcttctgattttgactgcctatgagttaagacttcttcttgttctccaaacctttttattctttgttgaatatgcatttctagggcagcagagcaagacatgaaaatctgtaggacagtcatcttttttcataacaaagtagaaaatatggagataagatactgacatttcacgaaaaagaagcatttactcacagtatggagaatattcataaaaatagctttttgtacttgctctgtacatggagcaaaggagaaaatgcataagaagtttgaaagtaatttttctgtgtgtttttacaacttttcatgtaggaatactccatattttttaaatgtgttaatttcatctccattgatttataagagataaagcatacactgaattacattttcttagcaacatttttccttttcaattttacaacaattactgatgttctgttatttcctttcataaacaaacacgaacttctctttctaaatgttactacaatcctggttgcactatttaggaagatgagagccaagctcaaacctactcaaaccaaaccaaaatgaaaacctgtttattaaatggaaagacactaatgaccaagctgagaatgagtaaaatatattttattgattaggaatttttgtatggtgtgttactttaatttatgaagcataaattgctgatacattgtcctgtttaaagctggtaattggattaatatcaaaatatgacttcggcattttttcccctgagcacccatagcactttgtacatgcttctgtgagtggtaataatttgcttccttctctatggcctccccagtctgtgagacattggaatgctgaacctgtgttgtccccatcctctgttcccagcagacatcagcatagtccctggcaaaaggaaggcactcagtctctattcagcagacatcatgacctgctaaagatttggtaaattcttcccattccttttataaagagtcctttaaaaatgttcatttctggtcttcagttgaatgtatactttaaactctaagattctttccttatgcacagaatgaatttacattccatgtgagactacatatataattttctacaagatttcagagattggataggtattaggagagcatttcactgaagttttacttctataagaaagttaaaagtagtatagccaggctcggtggctcatgcctgtaatcccagcactttgggaggccgaggcgggaggatcacctgagctcaggagatcgaggccatcttggctaatacggtgaaaccccgtctctactaaaaatacaaaaaattagccgggcgtggtggtgggcacctgtagtcccagctactcaggaggctgaggcaggagaatcgcttgaacccaggaggcagaggttgcagtgagctgagatcgttccactgcactccagcctgggcaacagagtgagactagtctcaaaaaaaaaaaaagtttaaaaaatattttgggggtaaagaaagtgccctttatattctcagtatggtgctattcatgctcttggagataggcatgaaaagatagataaatactgttcatcttcagataaattaaaatgacattagaaaatctatgaaaaagtggagagactgtatattgttttagagtgaagcgtcattaaacatgactgttgattgcttaaaatttctcttttctaggatttataagaggactctgcttctcttctctgttttttcttgacccacttttatgtgctatttttttcacagcgcatactttctccagagttctgctcaaaccattttccctttgaactccttcttactctgaattctctaagtacaacatccatttttctttgttttttttaaagctgagcacgagctgatgacctcaaaatctgccatcctgattttcccagcgctcctaaaattaactcaccatcttctttgcccaaatctttctctatctctgcctccctctttcatctgcaatccaggtctgtgcttaggtgatcttcatctgcccagccacccgacatgaaacctcagtcgccttagccttctcccttaacctacacatcctagtccttacaatttaacttactaaatattcctgatatctcactgttactcaccatccctcctccttgacactctcattgtttttcactggaagttgtataatataatagctccctaattggtatctcattttccaggcttgatctttttgaaatccattcaccaaccagaaaaaactttccaaaataaatctgacctagaaaaatccatctaacagtgctcgttttctggccatatcatatgacgtccctatgtcctggcccttgcccatctcaagagtttcatcgccacaatctgtgcctgacattttacaccttgcacttgttactcaattaaagaatttatgtttctcaaacataagtgtaagcttgttctctctgcctggtaggtccttctcagtttaaaaaaaatattgactcattcttattcatcctttgatactcaacttgttgagtgttaatcttctttttaaaattttccatctatcattttgttggattaagtttctctgcgcttggaaattcctatatcttatcattaatcatattatattacaattatgtctatttgtttcctgcctattagacattgtatttcttgatggctcaaactattttcctccttccttccttccttccttccttcattccttccttccttcctccctccctccctccctccctccctccctccctctctccctcccttcctcccttccttccttccttcctttcataggctttcactctgtttcccaggctggagtgtagtggctcgatctcagctcactgcagccttgacctcccggactacaggcatgcaccaacaaacgtggctaatttttgcataattttgtagagatggggttttgccatgttgcccaggctggtcttgaactcctgggactacaggcatgcaccaacaaacctggctaatttttgccacaaactatttcttattcacttatcataatgcctaatatatagtcagagttaagtaatgttattaaactaaactgggattaagagacagaagaaatgtttggttaatatttattgttgtaagttagtgttttgtgcaagccctatcaaaaaatgctctcatcttttcaagcatgtaatactgctcgcctctgtgctagatgaaatacatagaatgttaaatttttatcctcaccagaaacctagaagaggtagtgacttttgctctcatttctgaattaagagaaaaaaattgtctaatatcacacacctaataaagtaaagctttgaaccacatacagagataatttttccaatactgccttaaataggatcagaggatcttgtgttcaagctttaaactaagctgagcatcttccaggaggtgtgtgtgcatgcgtgtgtgtgtgtgtgtgcacgcgtgtgtgtgtgtgcacatgcatgtacacatatgcttgtggtgataatagtgcttctttctttgtttacctaacagagtttgaaaataaaaatatatcaccttttctccaaaggtcagctttctgaagtattgctataatatgtaggaaagtggtcaattgggatcatgcaaaacaccaagctaaattggcatgtgcttctgtggtcatttaaataatttctacatgactgcttatcctcccgtggaagttggctataatgaccttggataaatgaccttttatgcttgttaaagccccaagctaaagatgtgtctggcagttttggagcttaaaaacctcaggaaagaagaaactgtgcaaattatcctgctctttccatcttaaataaacattttaattttttattatatatgtaggaaaatgtatactgaaaaagaatatcattagtttatatgctatgcttttaaaaagcattttgaaaagtaatcatagtcttatctattgaagataatagactttttctgtagtgcatttttttaatcaattttgtgtttataatctatgcaattgtgcttctgaatataaaatcacacagagatcattatggaagcaaacagaatgctaatgacatggaagtaattcaggtcatctcttgttaaaatgtgagtggtagacactcaactgaataccaaattttggtcatgctcttaggtttgggaactttgatttttaagacttcaaaataaagtggaaaagtaaaacgtatgcatgtacaaattttctctcttcctcagtcttagaggtaagttgccacccaataaatttggttagtggctgcccatttggtcatgctgttctgaagcagtaaaatagaatcaagacactttatcttacaaaatactaacattgcaatgatcattgttaattttaggaaagtgtggttacattttgacaattatccatgatatgtgtacatctagttagtacacaactagtacatgtgtttttaacagatgttttacattattttattgtgtaagcacaacacaatttatttactcacttgccagtgaaatattttgggctttctttttttgcctgctaaaaacaataatgcaataaacaatcttgtaatatggtatgtgtgtttccttatgcataggtgtcacagtccctcaggtaatattgaagtggaattgctggataatagggcagcctatttgcacattcaatattacaagatattgccaagttatattccaagttggtcgaggctatttgcactatcatcaacagtgtacacgcattctagtttctctacagtcttgccaacaactctgatggtcagattatttgtcttttaaattttgcttatctgaacaggttaaatattatcttcttgttcaaatatgaatttctcaagtttgtgagactgagtatatttttatatgcacgttttgtgattacacagtttgaaattgctttttcacacgggtctatttttctattgggttgtttgtacatttcttatctacctaattttttgacatattctatattcaaatgcctttataagttatatgccctgcaaatatcatcttcagccactggcttgcaatttgactttttaaatgacatcttttcatatatcaaagtttttagctttgatgtagtctaattctccctgtcatggttcataacttatcatctttcataacaaaaatgcatccagaccttgatttcaaatatacatttttatattttcttttaacattttttatggcctgcttttccaatttacatcttaacccatctggaggggtgtgtttgtatgtgtgtgtgtgtgtgcatgtgtacatgtttgcatgcacacatgtgtgaacactctcatttctgtaaagtattacggaaatttataccatttgaataatttttcctgtaccatagtcgaatggtcccatcatttctttctcatttgtaatcttgacactgcctctggtttatatgaagttacagtatttatgtgatactttttttttcctggaatctccgttttgtgcagttgatttctgtttattcctgtgtcaacactatgctgcctttttttgccatagtttcatcatgacccttggtaggcagtaggaaaacacctcctgcaccaatcaaaattagtatttcttccaaatagtcttggatatatttgatcctttgctcttaaatattttttaaaatcagtttgttaccctcatctgaaatactattagaaattttattttaattctattcaataaattaacatttttatgattttctagtttatccaggactgcatttttacatttaatttataatgtttcaaaaatatttctaataaagttttacagcattttccatgcagttctactagctatttgggaatacttattcctagaaaccttatactatttgctgcaattatttaaaattatctttttaaaacaaagttttctattgattattagttgagaaataagtaattttgttagaattgtatttttagcaaactaactgattcttattacttctaatactattctatttttcttcaattttcaatgtacctaatcatgtcatttgtgcaattgatttcttcatgtctaatatttatttcaccttgttttagtgcagaagctgacaacggtaaaattattatttgtaaacagtaaaatattctgtattcagtcagatttagcaggtttttttttaagaaatattgcaattcatttaagttttcaaatgtatggaatagaggatgtcagcaggatggtgggtttttctagaccaattccctttgagagaactggttgacaaactcatacacaccatgcaactcagaaaatatccacactgaaatgggtaggaaagctgagatacacctatactacaaacctcactccaggcacagaaccttacaattgaaaggaaaccctcaattccacacttctctctgaggagtgaagagttgaaccacccacatagcacctcaacttttaaatcccaaccaaaagtctggctactaaatcccctacccctgtgagctggcagggcatggcatttgtgagttccccaggaccacaagaacaaataagtggttttattagcaggctaaaacattcagcttccagtttctcaatggaaggggtttgactgatatgtaatatctcaactttcccagttaccacccatgggtcaggcttttaactagcttgcatctaagagctgaccaagaaggtaatcccactaccaggggattttcagcagaaacctgtgatgtcagaagggaaagagatgatatattcaaggtgctgaaagagaaatgcttgccaacaagagtagtatacccagcaaacccgtcctgcaaaaatgaaagggagataaagacattctcagacaaacaaaagctgaagaaatttatcaccactagacctgctttaccccttggtgacctcaaagaaaatacctatggaagttacacaaaagaaaaacagaaataaaaaaaaactattgacacaaaaaagaaatgcaaaagaagacagcaaagggaaaaatgaaggacaaaaggactagaagataaacaaagacaatagttaatccttccttactgataactacttaaaattgaaataaactaaactccttaataaaaaaatacttaatatatctgtatctaacactagggcacccaagtatataaaatgaacctgaaagaagaaatttataataatacaataatagcaggagacttcaatatcccactttcaataatagacagaacttccagacaaagttaataagaaaacagtgggcttgaataacactacagaccaaatgaaccaaacagacatatataaaacattctatccaacagcagcaaaatacattttgttttttttgaccacatacagaacactctccactatagatcacatgttaggtcacaaaacaaatcttaaccaacttaagaagatcaaactcataccaagtatcttttccagtggtcacaggatgtttggggtgttgcttttctagctggaagcctctgtggccagcggagcatttgcttgagttttgctcaggcccactgggctcattcccacttggcctggcaggctgtgctaggttcatgttaccagctcagaccccatgcctgccaagggttagccaggcgcagagtggcgaggggtgcatgagcaagtgagcaccaggtccagccactgagcacagccaggcatgtcagctgctgaggggtgggcagctccaggtgccgtcacagacactggttccctgtgaggctgtggctagaccaggcataccacaagcagcttctactgaagacaacaggaacatggtagcagctggaagcttgcagataccaagaactgcagagctccaaagaggatgtcaccgcccttgctccaggagctcctaggtctgggctccccgaagggctgcagctcttctctcctctctcttcttttcttctcatcacctgcaatgtggtgagtaggaggcacatttcagccctggttgtgttatagctcttttactcccaccacttggtgggtctcagttcttctcccatgtccaggaagaatgaggtatacggacaactggagggtgagcaaggtgaagagtgctttattgagtgacagtacagctctaaggagacctagagtgggtagctcctgtccacaggcaggtagttccaatgagtgggcagctcttagcagagagtggacccagagtgggtagcttctatccacaggcaggctgtcccaacgtctgtgcagccctcagtggagagaagacctggaatgggcagctcctatccacaggcaagttgtcctgtcatttgctcgagtctggctgagtgtggggttttaatggtcctcagaggggattaagtgcatgctgattggtccatgggcagccatgggcgggcagaaaaagcaccataaattctcattccagtctgcagaactgacagtccggcccccaggattcagaccatccctggcttgaaggtggtgcttcactggggacctgtccctttccacccaggagcctgtctgcctcctgccaccatctatatgtcattcatggcacttaggctatttgtaccgaggggcacctacctgcaggcccatgccaagctgctcttagctcccccttggcctccctcccatgctctttggcacccaaagtctagagggggctgaggtggcagggggctggcgtgtcagcatcaccccaagcgtgtgcacacccagccaggtcatgacagcgcctgcgctctgccacaactttgctccaaaatcggagtggctgccaggggcagggagacgccaggcagcaggagtaggtgcttccaagactgtgggtggagggggcttcctgggcccggagagcacagggacgcccgggtccgcagccatggctgggcaattgcagctgcacccgggagtgtgggcctcccaccccagcaactcagaaggggacaagactcctgcctgttcctgtctcccacaatctccgaggagtgtgaagccccaatcgcacctcccctgctgcggccagcatctttgcagtagccactccagatgggcccctgatgccatcacaaccaatatggaataaaacttaataaataacaatacgaaaataaaaaaattagaaatatgtggaaactaacacactcttgaacaatcactgagtcaaagaaaaaatcaaaagggaatttaaagaatatctcaacaaacaaatataaaaacacaacttaccgaaacttacagggtgcgtaaagttataatagtagtaagtgagaagtttctagcaatagggagatagaaattctagcagagtataaacaagcagtccaagagatttattgtgatccattcacattagcaaaaccattccaactcatgattttaaaaatggaaatgtaaaactggcatgccattccttttttttttttttttttttttttttttttttttgagacggagtctcgctgtgtcacccaggctggagtgcagtggcataatctcgtctcactgcaagctccgcctcccaggttcacgccatcctcctgcctcagcctcctgagtagctgggactacaggcgcccaccaccatgtccggctaatttttgtattcttagtagaaacagggtttcaccatgttagacaggatggtctccatctcctgacctcgtgatccgcccgccacagcctcccaaagtgctgggattacaggctagagccaacgtgcccggccacgattctttacctattagagtggagagattaaagtaatttatattacctagtgttgtcacatgagagagcagggaatagacataaatagggtcaggcttcttgtaacacaatttggcaatatttttcaaaataaatatgactatgatattcgattaaattatttcatgtttataaaattaccctatagattcttttgcaaatgtgcatctaagatatggatacaaagataagcattatataaaagtgtaaaaaaaaaaggaaaccaactgtcccttaatagggaccaattaaatacattatggcatagcatattaatagaataaaggcaatgataatacagaatgagataaattacaagtgacttggaaaaatagttctgtcaaaaaattaaacaggaaaaagtcaagtctcaaattgtaaatctacttttatctctctttacatatacaatatgcaagtgtcttttctttgtggtaggaagaatacacattggcatatgaacagtagttattagttaaaaacgggatgagggacttgggaaaacagtaactttatcacactttttaatgcaactctacagtttgattttctatggctagagcaaatgccttctaatgacaattttcaaagtatagacgtgtggaggatttgggggagacaaaggagattgggtaagtctgggctagtcatgcattagttttagaaggctaggctagtttgttgaacactaggggagtgtctaaaggtttttgagcaagaaaagagtgtgctcagttttgtggtggtattgtttagcaagattaatgctgcagtcctgggagcattagatataggaggtctttagtatcatccagaggaaatgaaaagtgtacctgaactaggtgaaaacgctggaaatagacagaaaatgtatattggaaggtgtttgaaagaatgattacaagaaataaccatggattgaatgaaacttatgccatacacagtctctcaaaggaggacttcccagagctgaacgaaggaaggataactttcatggaatttattttgctgtctacttctattttaagaagttttcatttgcatatttttccttaaacataataactcagtaaggatgacgtatatttcttcttttcatgaacctttttttttttttgacaactactttcaggagatgtatattctacagggcttgttaccagagcaatatcgggataagtacatttaatatcataaaatgtgaacaggggataagatttttttccatttatcttgaagttgagagggttgaaatgattacttttctttggtacaaaaagccgccatataaatgggtttcttagaacaagtataagataataacaagataaaatggttctttttccatttaagtttattaagcattcagttcatagaaagttactggaccagttaaattaacaattcttatcttgtgattttagtctagcccaaaggaagcagctttattttgcatgggtgcagtcaacagaaaagctagacttttgtgtttggtaatttccctgcagtgtgttttatctgagattgagggataaaaagagttgccttttggaaaaacaaagggaaaaaaaagtctcccattatacaatagatactgaatcatccctttcattctacacacacacacacacacacacacacacacacacacacacacacacacacatacagccccctcagaataaaattaataacggaagtaatcaataaaatcataaatatggaaattgagtcatgtttaacataagaacataagaaaatgcttgctacacatacttattttacatattagagggatgccatagatttgtaaagcaaagggggacatacaactgagagcgtgcagaatttttttttgccatttttttttttgccagctttattaaggtatattcacaaacatcataatatatatatttatggtgtataccataatgttgtaatacttgtatacattaaaaattgattaagctagctaacataggcatcaactctcatagttattattattggtgctgagaacatttaagatccactcttttagcaatattcaaatatatattatcaactatagtcaccatgctaatagatctccagaaattactcttcctatatacttgaatttttgtaccctttagtcaacatgtccccatctcctgcccctccccataaccatcattctactctctgcttgcatgagttccactttatttttagattacacatataagtgagatcatgagttatttgtttttctgtacttggcttatttcatttgcataatggtttccagtgtcatcaatgttgtcacaaatgacagtgttacctctttttcttaaggttaaatagtattgcattatatatagatattgtatataaaaataatttattataatatatatgtatatatgccatattttctttgtccattcatccacggataaatggatcatcattacgttcattctatatcttggctattgtcaataacgctacaatgaacatgggagttcagctgtatttttgttatacggtactgatttccgttcttttgggtatatacataagagggattgttgggtcacatggcagttctatttttaattttttgaggaatgcctaaattgttttccaccaaacataatactttccctgaaaaaggaatattggagtccactattattagtgtatttctatttttctcttcagttctgttaatatttatatatttaggagttccaatttgagtgcatatatatttataattgtcatattttctagatgaattgacccctttatcataattcaatgattgtttttatctttctttacagtttttgacttaaaatcatttttttctgatataagtatagccactccagctctcttttggttactattttcatggcataccttttttcatctgtctgtttctgctgctgtagcaaaaataccacagagtcggtaatttataaataatataaatttatttctaacagttgtagaaactagaagtctaaagatcaaagccttagtagatttggcttctgatgaaggctttccctcttcttccatgatggcatcttgtggctgtgttctcacatggtgaaacgtggaagggaaaaagggatggaaggggcaatctcactccctcaagccctttcataaggcactagtcccttctaggagagctttgccctcatagtcaaatcactcctaaagcctcacctcttcatactgttgcactggggatcaagtttcaaaatgaattttgaagaacacacaaacacttaaaccatagcatcaactaaaatcagtttcttgtaggcagtatttagttgaatttctgtttttaaaaaatcaactcagccaatgtgtgtgtatgtgtgtgtgtgtgtgtatatatatatatttttttattttaaatatatacatatttttttattttaaaactttttttgtcttattgtttgtaacattattttctttttttccctgcttttcctgagctgtatttttttattggagaatttaatccacttacatttaaggtaattgttgataggtaaggatttaccactgccgttttaaaaacgttttgtaactcttttgtagttcctctattccattctccctcttgctgtctttcttcatgatttgataatttttgtagtggcatgatttcatttttttttttcttatattttgtgtatcatttacaggtttttttccttgtggttgccatggggcttacataaacatctaattgttatagcagtctattttaagctgataacttctattgaatacaaaaactccgttttttaacttttcacttccttacattttatgttactgatgtaacaatttatattttttaatatattttgtatcaaattaacaaatttttatagctatagttacttttatactttgtattttaacttatatgagttaaaagtgatttataaaccatgatgacagtattctggttgtattacagtttagtagagtatctaaacttgacagtagagtatcaaaactttacagtgagttttacatttttgtatgtcctcatgttgttagcatatgtttgtttcaacctgaaaaactttagtttacatttcttgtaaggtaaatctagtgtgatgaactccctcagcttttgtttgtttgaaaaaatttatcttattttaacaattatttttgaaggacagccttgttgggtataacatttttgattagaagttgttttcttttactattttgaatacattatccaattttctcctggcctacaaaatttctgctgagaaatacactaacagtcttatgggggttctttgaatgtgaagaactgattttttcttgttgcttacaaaattctgtttgtcactgacttttgagaatttggtaataatggatcttggtgaagatctggtatttaatatatttgagtatctttgggcttcatggatctaggggttcatttcccattctagatttgagaagtcttctgtcatttttttacttaaagtaagcaatctgtccctttctctttttctcctccttctggtaccctgaaatgtgtatattggtttactttatgatgtcccataaatcctataatcttccttaacttgttaaaattctttttccttttgttcctctgactgaataattaaagtgatctggcttcaagctcacagattctttcttatgcttgattgggtctgctgttgaacagctctctatgaaatttttcagtagactcattgtgttctttagctccagaatttctgtttggttctttttttatggtttctatctcttctttgaacttctcactttgttcatttattgtttttctaataaatttagttgtcttaatatctaatataatttagttatttcttatagctcaatgagctcctttttttttttttttttttttttttttttttttttgagacagagtctcactctattgtccaggatgaagtgcaatggcatgatctcggctcactgcaacctctgcctcctgggttcaagtgattctgctgcctcagcctgccaattagctgggattacaggtgcccattaccatgcctggctgatttttctatttttagtagggatgaggtttctctattcggccaggctggtctcaaactcctgacctcaagtgatcaatctgccttggcctcctaaagtgctgggataacaggtgtgagccactgtgcccagcctcaatgagcttaagatggttattttgaattctttgtcaagtggttcatagatcttcatttctttagggttggttactggtgtcttattttgctcctttggtggtgtcatgtttctctaattattcatgatttttgtggccttgtactgatatctatacattttaggaagtaagcatctttccggtctttacagaatggctttggcaggaagagctcttcgtaaattagcctgtctagaaattctaggcagcctgacttagattccatgtgcaggcttgctgctggagtccttgggcagagtaacctgatacctaggtcaacaagtgagtaggcctggaattggctccacatgggatggtctggactttgggtttgctgggggcaggcctgcagcctgagttcacatgggccatctgggtgtcagggcccactaaggtaggcttgtcaactggctattcagggatatgccttgagtctgcccatagaggccagcctaggactggagtttacccaggtgagctggatccctagattttctggggcagcctggaccctgggtccagtgaaacctgggactgcaggcaccagtctggtgctgaggcagtcctggagcctgcatccaccagagtggtcctagagccttggtccatgggttccagcctggcactggggcctgctaaggcaggcctggactcttggtctgctggagcactgagtcatgggcgctaacctaatgccaaggcctggtggtgggataggcctgtagccggtggtgatgggaatcatcctggcaccgggatgggcctgatgacttgggtcatagaagctagcctgaagcctgagccatgaggaatagcctgatactggattttactggggcaggcctggtgctaaggtctatagcaaagtcaagtacttattctttttctcaggcagaaggtgtctctctctttgctgtgctatgcaggcttgggggagggatgatgccagtaatataagactgtctttcttgctctcttcaatgtgtctttccttatttctatgctacgctgagatattataatctcttacctggactccttagctcttgtatatttttgtgcttggatagttccaattaagtttcctgagagaagacaagtgcagaaaagttctattccaccatcttccagatgtcacgctgtttttgtaaaattgaaataaaaattacatattgtgaaatgcgtagatattagggattaaattcaatggattttgataaatggatataaacattatgacataaaacattattattaccctagaaattatcttaggcctccatttagataattccccatagatagccattgttctgatttccataaccataggttggttttgcctcttttaaattgtataaagatgggcattctcacaaaaatgtattctttgattgtatatgtttttgaaagtaaattttttgacactcatttacattgttgcaggtatcatcattcatgtttttaaatcagtgggtataattttattggataactattacaccatttatttatccattctgttttgatggacattttaggttattccctgcttgggactggcataagcttttttatggacatatattaatataagtttatatgaccagtcctatgcatctataacctgaggaaagtggagaggaactggaaatgtgagcagtttgagcatctagcactacatcagggaacattattatcttccattcaagctaccctggaggatctgtcttctcccttcttggcgcaaagctgacagaaaacagaagaatgcatgaaaatattgggaggtgttggatatgttaattaccttgattatgttgatactatcatgggtatttgcatgtgtacaaactcatcaaatggtatacattatacctcaataaagctgttaaataaatagaaatgaataactagatacatgtataaaaatggtgacacttgctttctcagctgaggtcttgctacatcagggaagagccctgctgccactgactctcattgccatggcaacacatgccctctcagggcttctctttcctactgctttgattcccagtgggaaggagaccccacaggcattctcttacactaaactgtcagctaccctaatcgccagccttttctcctcaatgttttaggaagttgctgtagttctgccataatttcctgtaggtattttcttactaccttgttatcttgggaaagagggttatgagttggctcttgggcaaattatttattctagcttcaactggattatttttgctagaaattccactaatttcatagcatatcattggtacacttctgccatctctgatgctgatgtagttttttctctttgttttaagccttataattcaggttctagaaggaagcagttgaatgtcagtattctagtcatggttatactcagatgtgttctttactcagagtttttatctttaatatttctttggaagtttagaatttaggcatcaatattttcaagttaacaaagaatgaaggcaaaagagactagatagattttgtgtgatttcaaattctgggtagcagtcttgttctgaaatgttgctctgttatggatttctgactgtagttgaatctgagcaatacattttagaagggattacatacagtcccttcttttcgaatgacatactttgcatgcgacatttgatgttgtattatgctgttaggctttagaaagttcacaagaattttgtcaaggaaagattttaaaaagcttcagcttaagaattctactttgctagaagtaatgtatcagaaaatgaagaatcacaacttacagttagataattagaaaataggcaagatttagataagagaaaacatctatacaatcaagttgctcattctcattagtaatgtaatctgtgttttctaataatcttgcggttcaaaaggtaaattaacattaataatttttacctgctttgaaatttccacaaataaaaaaacaccaaaatcctctctgtctctcctatatcctccacctacttatgagaaactcaagtcctcacagcctttacaaaaactgtgtctcttatggtctgtcaaaatgcatcaaggactttacctatggcccaagggtccattattgagtcacttccagtggctgaaatttcctatggcagctgaagctgtggtcaccctccaaggtcaagagatgtcaaactgcagcaatgtctagcgttggctggtgttctggggagtgctaataataggccaccagctatgcttatgatgatgctctttccttctttccttatttcacatgtttacagcatgccactgcctctgttttaaagcaggagacatttctccccactgacatcatggagtcatgttgctccggaaacagggcaactttgtaccttcattacattgtgtgtttgtgtttgagcgtttattcagtttttgcttttgtcccatttttcttggggcttgtccagtcatcttaggagtggggtacacagagccagaagaaaatgtaattgtgtgagacatttgcgttaatggtctctttagttagattgtgattcttaggaagatcctctggctctgtaatggcctcactcaaccattattccaggaagaccaacatatatttaaattcaggtagtagccacaatttagagtcaagatgttaataaccccatcccactccaagcatattgcttttaaaattaaaattctgtttctttttccagagttgctgacttcaaatcttgttttcaagccattgaaatttaaatagttttgtttcttgggcctgaacttcagctcttattctcgctgccagggattggtagataagatcacatctgcaatattatttgcataaaggcacatatattttatgatatagaaccttactctgtcctacacacatttagagctagcctagaataaacagtttttaatatggtttatatagttgacaggtttttgcctatcagttcaaaaaactgaactaagatgatatttttaaaatactttaaaaaagtgaaatataacacacccacacacactacaattcaaaaaattaatatgtattcaaaaattcatatatgttgaaacaattattaataaatatgtatattgaaatatatgtaaaaaaatctcacaaatcatagtgaaagaactaatgcaaacatgattcaggccctgtaacaacattaccagcatcattaatgcccccttcagacttgctccccagcactgcccaggacactcttcaaaggtaactgctattctaatttataacaccataatgaattttgcacgtttaaaaatgttttaaataaacatttattgacttaagatacacgtccagaaggggcacaaactgtgaactttcacaaagtgaccaaatctatggaaatggcatcccagaggtattcttatgcctcattccagcaacttttcccccaaccagaggaaaactgctatatttacttcttacaccataattcaatgttgacttttttgaatagcacaaaagtggaatcacactctatgttatcttttgtgtttggcttttttcctcaatattgtttgtgagattgattcttggcaaatgtgcggatattcatttgtttttcattgcttaatggtacttcattctgtgaatattccaaaatccatagctatttgcattgatgaatatttgcactattttcagtttggattcttgcaaataggactgcaatgaatatttaaggatgagaatagacacttcagcggtgttgtggtaaacattcctttacaggtctttaggtgtgcataagtacagaattctgttggttatataatgagttgcttaattgctgggtcacgaagcctgcatttgttgagctttagtagctactgccagttttccaaagtggttatatcaagttacatctccatcaacaggatatgatgatttctgttgctccacatcctatcctagccaacacttggtattgctagtttgtttacttttggtgagcataatgtgtacttcatgtgcatttccttggtattttgaggccaagaacctctttgtatgtttattggtcatttcggaagtctctgttcaagtcttttgctcatttattttttattttattctcaactttcatctcatttttatttttttttttatttcaataagtctttggggaacagatggtgttggttacataaataagttctttagcggtgatttctgagattttggtgcacccaccacccgagcagtggacactgtacctgatgtgtagtcttttattccaagccaccccacaccctttcccctgaggctccaaagtccaatacatcattcttatgcctttgagtcctcttagcttagcttccacaaatgagtgagaacatacgatgtttggtttttccattcctgagttacttcacttagaataatagtctccaattccatccaggttgctgtgagtgccattattttgttcctttttacggctgagtagtattccatggtatatatatatatatatatacacatatatatatatatatgtatatatatcacattttctttatccactcattgattgatgggcatttagcctggttccatatttttgcatttgcaaattgtactgctataaacatgcatctacaatttgcatatatatatgtgtgtgtgtatatatatgtgtgtatatatgtgtgtgtgtgtgtgtgtgtgtgtgtgtgtgtgtatatatatatatatatacctgcaagtatcttttttgtataatgacttcttttcctctgagtagatacctagtagtgggattgttggatcaaatggtagatctacttttagttatttaaggagtctccacactttttcataatggttatactagtttactttcctatcaacagtgtaaaaatgttcccttttcaccacatctatgccaacatctattattttttgattttttgattatggccatgcttgcaggagtgaggtggtattgcattgtgcttttgatttgcatttccctgataattagtaatgttgagcatttttccatatgtttgttggccaaatgtatatcttcttttgagaattgtctattcatatccttagctcactttttgatgggattatttgtttttttcttgctgatttgtttgagttcttcatagattctggatattagtcttttgtcagatggacagattgtgaagattttctcccactctgtggattgtctattaactctactgattatttcttctgcagtgcagaagctttttagcttatttagttcccatctatttaatctttgtttttgttgcatttgcttttgggttcttggtcatgaagtcttggcctaagccaatgtctagaagggttttttcaatgttatcttctagaatctttatggtttcaggtcttagatttaagtctttgatccattttgagttgattttcatataaggtgagagatgaggatccagttttattcttctacatgtggcttgccaattatcccagcaccatttgttgaatagggtgtcttttccccactttatgttttcgtttgctttgttgaagatcagttggctgtaagtatttggctttatttctgggttctttattctgttccattggtctatgtgtctatttttatttttaaagttgaaaaatattccagatataagccctggttatatctgtggttgtagatattagaaatgtctttttgccatttggtgatttgtattttcactctattaatgctgtcttttgggtaacatgcatttctcatttaattgtactccatttttattaaactttaatggttcatgctaccttgggaagaaatctctgtcatcccaaaggccaaaaagaattttaatcagaaactttgttgttttctcttttatacttagatttaccatctacctggtattgatatttttgtatgcagtgtggtaaagggcagggattatttctttctgtgtagatattcaattgctccaacacaatttgttgaaaagacggtatttttccccatgctctttaatgttgtttttctcatattccagtgtgtgggtgtctatgtgtgtgtgtgtgtgtgtgtgtgtatatatatattattatattatatatatattatatattattatattatatatattatatatatattattatattttatatatatatatattatatatatatatttagtccttcaattccatgaacagagtatgtccctctgtttgtttaggtaacttttaattttgtcagtaatgtttcatagttttgtttgtttgtttgttttttacagagttcttacacactttaaaaatatttatttctagcattttgtggtttggatgctatccttaatagtatattttgacttttttaacttgtttgttgcacttatacaaaaatgtaaatattttttctatattgaccttgtagacagtgttcttataaatccctttattataataactcaaatagtttatctgtagattatattgaattttctacatatgcaatatttacagtgccagtaaaagtcccttgctttcatttttggcaattttttttgtttggctatacgattttggtttgaaatcattttgtgcaatttgaagatgtcattcctttttttctagtttccattgttaattttgagaagtcatctgtcattcttctttgctcttttgatatcaagatgcctagttttttctctggctgcttttaaaattaattactttcattttctgcactattatgataaggtacctaggtttcattttgtttagatgtatttgaggttcctaaaacttgttgaatctgtgacttgatgtattttgtgagttttgaaatgttcttggccattatctcttcttcttattattatctcctttcctttttactaagactctaatcttcacatacagttgactttttctttgtgtttcataaataatttatgttctttgtgtgtgtgttttccattccttttctctttgtgcttcagtacagatattaaatttttcaattgaattcttaattttagtcactttatttttcatttctatgatttcctttttttattagtttacagttttctgaaattctacattgtgtcttttaatttagtaataattttgttggatatagaattttggttttatatgaaattattttaaataatatatgagaatacttatttaaaaatccatacctggtaactgcaacatcagaatctcttataattctaattctattttttcctggttctttgaaatattttacaggcctagttgttttagattgatgacaaattttgtgcataaaaaagtcaacataatttgagtttctgaatttttatttccctctctagaggatttaaatttgctactgccaggctgttgagctattggttgattactgtaatctacttaatctaattagagattgagcaagttggaatctgtaacctgaaggccttcaagtggtggtcgatttctggcatatacttactcccaggctgtatgtagccttttggtattcaaactaaaagctttgggtatttacttgggtctcttttccttaacaagtctaggattctaactttagcacccctcattcctgtgatgctgcaatactccctgctcacctgcttattccctcaactgctattttcaaaaaggtaaatgcttgtggagcaaaggagcactaaatatcaggctcactcctctgcacattctcccagctccacaagtctttggtggtttggttgctctctaatgtcttcaagtatatatttctatctaaatcatcttcagtttttctcatttttcttagtggaaatattgacctgaaacaagcaagtctactgttgcttgaagaaaacatgaaatttttattctgttgttacattcaagatccttgctagcacctagacgctttttaaaaattaaacataaatagtattgaattggcaaaaatgagtagcaatatgctatgtctcaggtgaaaaacacatgcaaggcagcaaataacattccacaaatattaacaattaagtctccttcatatatactatgcacaatgcggtatgatgagaaagcagatgagatcagactaatacggaagaggctacaacacattgttttgtaagtaatattatgaagactatggtactacaaatattattaatggtaatgtcaggttgataattttctaactttgtgtgtatatgtgcagaaaactgtgctatggagattatccagatgtagttctgtgcacttaaaagaaaattgcaaataataaaaggaaacaataaaatcataacattttccctaatgaagcaggtgtctaaggtcaacatgcattctgttcattgacttgaacttctacatctatagaacatcataaaaattgaggctacatatcagtaatatttacattatatttcatatgggaaaatacacaatcacttttaaaagttatcaaacaaaaattaagttgaaaaaagggttaaccagtttccaacttccgtatatagctagccagttatcccaacatcatttattaaatagggagtccttttcccattgattgtttttgtcaattttgttgaagatcagatgattgtaggtgtatagcattatttctgaattctctattctgttctgttggtctatgtgtctgtctgtttttgtatcagtatcatactattttggttactgtattcctgtgatacagtttgaaggtgggtaatgtgatgcctccagctttgttccttttgcttaggattcaattggctattcaggctccctttgggtttcatatgaattctaaaatactttttttctagctctgtgaataaagtcattggtagtctgatagagcaaattcctgaatctgtaaattgctttgggcagtatagtcagtttaatgacattgagtctttctattcatgagcatggagtgtttttccatttgtttgtgtcattttttgagccatgttttgtagttctccatgtagacatctttcacctccttgattagctgtattcctatttgtgtgtgtgtgtgtgtgtgtgtatgtgtgtgtgtgtggcagttgtgaatgggactgcatttctgaattggctctcagcttggatatttgtgtataggaatgctagtgatttttgcacattaattttgtatcctgagacttcgcagaagttgttatcagctgaatgatttgggctgggactgtggggttttctaaacagaatcatgttgtctgcaaacagggaaagtttgacttactctcttcctatttaagtgctcttaatttctttctcttgcctgattgccctagccagaacttctaacactatgttgaataggagtggtgagagaaggcatccttgtcttgtgccagttttcaagggtagtgcttccagcttttgcctatttagtatgatgttggttgtggatttgtcacagatggcacttattattttgaagtatgttccttcaataccttcaatgtcattaatgagtgtttttaacataaagggatgttgtgttttatcaaaggccttttctgcatctattgagataatcgtgttttttgtgtttagctctgtttatgtgatgaatcacatttattgatttgcatatgtggaatcaaccttgcatcccagggttaaaggctacttgatcatggtggatgaggttcttgatgtgttgtgggattcagtttgctagtattttgttgaggatttttgtatctgtgttcatcaaggatattggtccactggccatttcttaagtgacttctttgctgcaccttctcttcttttagatccatagtaaatagaaaacctacagaatgggagaaaggacttgcaaactatgcatctgatgagggtctaatatccagcatctgtaaggaacttaaacaaatttgcaatgaacaaacaaacaacctcattaaacattaggcaaagaacatgaacagtcatgtttaaaaagaagacctacatgcagcctacaggcatatggaaagaagatcaatatcactgatcattagagaaatgcaaatcaaaaccacaatgagatatcatcttacaccagtcagaatggttattattaaaaagtcaaaactaacagatgctggagaggttgtggagaaaagggaatgcttatacactgttcttgggaatgtatattagttcaataatcatggaaagcagtgtggaaagtcctcaaaaagctaaaaacagaactactattcagtaatgggattactgggtatatacccaaagaaatataaatcattctattataaagacacatgtacatgtatattcattgcagtactattcacaatagcaaagacatggaatcagcctcaatgcccatcaatggtcgactgaataaagaaaatgtggtacatatacaccaaggaatactatgcagccataaaaattacaagatcatgtcctttgcaggaaacacgaatggagctggaggctattatccttagaaaactaacgcaggaacagaaaatcagataccagatgttctcacttataagtgggagctaaatgatgagaacacatggataaatagaggggaacaacagaccctagggcctacctgatggtgcagggcagaaggagagaggggatcagaaaaaataattattggatactaagcttagtacttaggtgattaaataatctgcacagcaaacccctgtgacacaagcttacttatataaaaaacctgtacatgtacccccgaatgtaaaataaaaaaaaagtgatattccaatcatttggataatttagttatctaaaataatgcacttccctggataactggatagatgggattttattgatgcgttcgatattttgtcatttgatgaagagcatttgtgttgaggttttatgaagcatctgaaaaaatacatattaccttattttactgcaaatagtaattgccaacagtcaagatatgtactaccaccaaattccgtgttatttgtgatcaaaagatatacacagatacttgaaaactgatttctacgttgcatatgggaaaaatacctcatttttctcagctgtccattatttttgagatattatgtgcagtgatagtaagaacaagcagatttggaacacatcagcaataattttttcaatcagagtcctgccaaaatgaaagaatttgacagtatccggcaccctgtactcatgcttggcttctgtagaaactgtggcttgcaaaagggcagctgggtactgtgttttggtacctcattctttaaacgtataatgggaatctggttggttcaggaaaacccttgcctacttattattactctgtttttagagttgttgctgccattgattagatgacatttaagcccactgcactctcataccagattcttgtacaggtaaattctaatgcttgatggagtaacagagtactgctgtggagaaaatgcagtaactggtcagttactctttaattccagaacctccagcagttgtaaggaggactggataaattgcatttggtgggttacttgacagccgatttgcacataggatgccatgggctatggtaaaataatgtgttctacttgtggcaagtgtgcttagaataaaaacacactaatgctgtattctcagtaaggcagagtaggaaataagacagaaggtaaatggaataactctcttagcctttttcattttttgagatggaatctagctttgtcactcaggctggaatggagtggtatgatctcaactcactgcaacctcctcctcccaggttcaagtgattctcctgcctcagcctcccaagtagctgggattaccagcactggccaccatgcccagctgaattttgtattgttagtagagacagggtttcaccatgttggtcagcctggtctccaactcctgacctcaagtgatccacctgccttgacctccaaaattgctgggattacaggcataagccaccatacctggcctcttggccttttaacatacattcagtaacgcatgtaaagaattgcttcatgtagaggaagcttccttttaagaggattttggaggtatttataagacaatatggggatgctatatttgtgtctaactacaacaaaatgtattacaaggtttatttttcccttattatataagaaaaacatatttaagaaagatataaaaacaaaaaagaaaataaaaatagcttaccattccagaaataatttaacataatttttccacattattatatatgtaatttttatatacatttttgtatatagattattttaaaataagaatatactgtattggactctggttttttttggttgttgttcatttaacaatgtatggcgaatattttcccatgttaataaaagtatcctatactagtcatttgaatgtttgctgagaattaattaattttactgatgtatcctaattatataattattcccttggtgtattagtctgttctcatgctgctaataaagacatacacgaggctgggtaatttataaaggaaagaggtttgatggaattaccgcttcacatggctggggaggccttaaaatcatggcggaagacaaacgaagaacagagggtcctcttatatgtcagcaagctgaaagagcttgtgcaagggaagtcccattcataaagccatcagatctcatgagacttattcactatcacgagaacagcattggaaaggcccgcccctatgatttaattacctcccaccaggcccctcccacaacacgtgggaattgtgggagctgcaattcaaaattagatttgggtggggccatatcacttggtgatagacattgaagtcttttccttccttccttccctccctctccctccctccctccctccctccctccctccctccctccttccttccttccttccttccttccttccttccttccttcttcctttccctctttctctctttcattctttcttttcttgcttctttttggtataagccatgttaacataaaaatcttaatagctacatatgtaaccatacataactgtctccttatgttaaatagctagaaatgtaagtggtgaatcaaagggtatgtgccatggtacagagatcagctgaattcaataaagtaccagcagaaagcatctttattcttttaaatttttgttttgaactatagttcttttgttcctacagcaaaaaaaaaaaaaaattcaggcaggtttcatagttttccatgacactcctaaataataaatggataatttatttagtattttatgaattgtccaaaatctggaagaatttcatggtctaacatggtttggtaggtgctccttttggaaataattactattcctgataaaattctccagcaattttctgatagacattaatgaactgaaaaacctaaacttttaaaatcctaacagtgttcaatcttaggaaaaatctaatgccatttaacaaacctcatgaagagtctgtaatttttaaccagctattgcattatagtttatccaatctaacaattattttacagccatttccctccatgaaatgtgtcttccagaggaattgtttgaattgtcatgttcataagctccttcctttgtgacaaattttaagaaacacttcgatgtgttgataatcaatgtgtctgtgaagttgctttaccagacattagaaagttctatctacaagactaagtggggtttattccaggtagataagtgtagttaaataaacaattaacattattcactacattatcaaataaaaaataatggtcataaaatcatgttgattgatacaaaaaagaatttcacaaatttgtgttaatttatgattaaaacaaacaaaaagttttttgcaaattagaaacagcaagttccttactctgacaaaaaaatatcagtaaataacctacaggaaaaatcatacactatagtgaaatattaaaactatccacccaacattaagaacaagatgattttgtccagctgtttaatacaatattttaattcagtacctaaccaataaactaagataagaaaaaagtctaacgagagttaaaagagaaataaaggtgtcactatttgtagaacaagatgatcaagtatgtagaaattccaaaataatccacacatgtaaattaatagtgaattgcacaatatcactatataaaggtcataaacaaaacgtataatgcacaacgaatttttaaaagttgcgaaaatatcatttataatataaaaaaatcagatacctgggaataaatctaaataataatgtacaaaatctctttatcaaaattaaagagctatataaatgaaaagatatttcatgaggttttggaagccttattattgtaaagattttatttattgtcacactaattttttttattgagatggagtttagctctgttgcacagactgaagtacggtggcgcgatctcagctcactgcgaccttgcctcctggattcaagtgattctcctgcctcaggctccagagtagctgccactacaggcacctgccaccacacccagctaatttttgtatttttagtagagatggggtttcaccatattggccaggctggtctcaaactcctgacctcaagtgatccacctgcctcagcctcccaaagtgctgggattacaggtgtgagccactgtgtccgacgtttcacactaatccgagatccaatgagattgcaataaaaataccgttaggatttaggcatttatttatttcaaaagtcaccaagctgaatttaaagtccattaggaaaggcaaaggtccaaggataggcaagacaatcttgaaaagaaaaaaatctgaaagacatttactctcttcacagattattatagagctagagtaatcaagacagtgtgatattggtacaaaaataaacaaatagattaatgaaatagaatatagtgtaccaaaataaaccagcatatatattgccacattatttgtaataggaaacatagcaattcaataatagaaaaagggtgttgttaataaatagtcctaggccatttggatattcacatggaaaaaaattatcttgatccctaactcctcacacacccccccacacacacagtttccatttcatttgcaatctaattgttaaaagtaaaataataaagatattagaggaaaatgtgattatcgtcatgattttgatgtaaataagacaaaaagcactaaccacaaaagaaactgtttttcaaaatacatatcaagtcttctgttataattacggtagaataactaaagaggtttcctccagttagaatactggacaaagtcacaatggttttcagattttagaatgcagatcacatagaactttgattcacgaaacaagagaaacaaaagaggagaggtgaaagaataccttggctatctgtaggaaaacgcctttctggactatggcagggaatggaatcacaaggagaacatggttgtcctcctgacttgaggagactgactctcgttttggaaaaatgaggcagctacagtattcaaggaagagtactggggaggagagaattgcagagaaagagctctagaaacccacatagggggctgggcgtggtggctcacgcctgtaatcccagcactttgggaggctgaggcgggtggatcacctgaggtcaggagttcaagaccagcctggccaacatgttgaaactccatctctactaaaaatacaagaattagctaggcctggtggcgggctcctgtaatcccagctactcagtaggctgaggcaggagaattgcttgaacccgggtggcagaggttgcagtgagccaagattgtgccactgcactccagcctgggcaacagagtgagattctgtcttaaaacaaacaaacaaacaaaaaaacaaacccacatagggataacttcgattctgttgctgaatatcacgctacatgtgtgtaaggtaaaatgtcatgaggttgggaaaagagcatccaggtagatatattctgaccaggtcccagacctcacaaagggctacagggcattttatgtttcagaaagaggaagtgtcctcatcgaacacctggggcatccagtgaggacaacggagaggctgtccttcagtaaggtggctaaaaaccgaaggcgactccagactcacgctaagaaagctttaaagcaagctatgaaaactttaagctgctctgcaattaacttaaatgcatgacagaacaaagtgtaactctctcaaaaggaagactacaaaaccaggcactcaataacacaaattcaccatgtccagaattactgaacatgcaaaatatacaatgaagaaaaatgtaactcattaacaggagaaaaattaggcaatggaaaaagacatgcttctcctgacagggtcaatacaagcaaaaaataaacgaaaaagaaaaggaaaaagacacatacatgacaaaaataatgaaattagcagacgaggaccttacaagagcttatataaacatgctcaatatgtgccagtattaagggaaaatgaacataatgaaaatgggaataaaagataaagaagaaagaacaactcattggatgagcttaaaaacagaatagacattgaagaagtttatcaattaacttgaaagtatagtaattgaaactatagaaacgtaggcccaaaaagaaaagagaaaggctaaaatgaaaattaaatcaagagcctcatgacttatatcacaatatcatatgtcatatataaaaccctgtaccaatttactaacgaataatactatcctggtttaatttgcatttctttgactacttgatttaccatttctttcacatggcttttgttaatattttttcttagtaaatttccaggagaaaaacagtcgtttatgttatcacaggcaaactgggatcacgttgattaaatcagaatcttttatgataaacagccatttcagcaatcagaatataggccatcggttagatgaaagtaggaatggacccacagttttttttcttacctattagaataactttaattctaacttgaatccttgatgagaaggtgagtgtgccgttacaggttttcattttagtctttaaaaagacaatcatgatcaaagagctaccacaaaatgaaaaataacaatgagaaagtttgcttgatatgcttttgctttaggggccccacgttagtgtgattccactctttgttaagtacacagtgtttcacaaaacacaattaagttcctaaggagatatctctgttgaatgtaatggcaagtagaatctcaagaaggcttggttacaagatcctaaaccttaattcgtatacatgatgggtctgtcaataagtaggaaaccattcaaacacagcatttaaaagttgcaccttcagagtgtgatattccccttcctgtgtccatgtgatctcattgttcaattcccacctatgagtgagaatatgcggcgtttggttttttgttcttgcgatagtttactgagaatgatgatttccaatttcatccatgtccctacaaaggacatgaacccatcattttttatggctgcatagtattccatggtgtatatgtgccacattttcttaatccagtctatcattgttggacatttgggttggtcccaagtctttgctattgtgaataatgccgcaataaacatgtgtgcatgtgtctttatagcagcatgatttatagtcatttgggtatatacccagtaatgggatggctgggtcaaatggtatttctagttctagatccttgaggaattgccacactgtcttccacaatggttgaactagtttacagtcccaccaacagtgtaaaagtgttcctatttctccacatcctctccagcacctgttgtttcctgactttttaatgatcgccattctaactggtgtgagatggtatctcatagtggttttgatttgcagttctctgaggggtggggggaggggggagggatagcattgggagatatacctaatgctagatgacgagttagtgggtgcagcgtaccagcatggcacatgtatacatatgtaactaacctgcacaatgtgcacatgtaccctaaaacttgaagtataataaaaaaaaaaagttgcaccttctgtacacaatgttacaagctgttatgcgttgaatcatgttcctccttcactctgaaattcatatgttggagttctaacctctaggacctcagaatgtaaccttatttggaaataggttcattgcagatgtagttagttaagataaagtcatactggagtagggtgggcccctaatccaagatgactgttgcctttacaaaaaggagaaatttggacaaagacatacacacaggaagaatgccatgggaagatgaaggcagagatggagatgatacagctacaaaccaaggaatgtcaggttgcctgcaaaccaccagaagctaaggcagaggcaaggaacagatttcccctcacagtcctcagaagaaccaacctggctgacccttcatcttggacttctgacctccagagctgttaggccataaatttccgttgtttaagcctccaagtttgtggtatagaatatgtttgatatgacagtttaatatggcagcctcaggaaattaatatatatgcaaaaaaccccaaacaaaatctcccaaacaaaaaaacaaaactgtcatttgaaaaagtgatcagaaacaaataaattcattagcagagcatgctaggattaggtaaagcacgagtagaacaaataagtatgttaagagagatagtgactaaaaaaaggctacagtggatgaaaaactttttaagaaatccttatttttaaaaactaggtgttaaggttgcatgataaaagcagtttaaattacctttgcttggcatggttttttgaataaagagagctgttaaaatatggcattgagatataaagggcatcacttgagcaaaaatgtgaagcacagaaatatagtttattattaattgggttttactattagtatcttgcatttttctggctcaaagacagcaagatactacatttcaaaaggtttaaacttagctcaaaatagctttaaattgtagcaagaggagctgtgtaattcaaattttctctttgtacttgtctcatctttaagactaatggaattgattggtgaattattattaaaacatccttcaagtttgaggcatttcccagcgagttattcagaatgctgattgttttccttttaccagctttcatttgtactttatgggtcagtgactaaaatgtaggatgctctctaagtcagagtgacttcaatataaaagatgttagggaagcaaaattgcatgccaagcaaatctttatcttaattagctgctagaacatgaagagtttgcttctgtgcctaaaacatattacagctgcctacttatgtgaagcctttattgcaccacccaacacagatttttttccccataatcactgagatttgaaattttaaaggagaaaaataaattcttttcttggatgcagtatattctgccgaagagtgaagaagcacgaacatttccagtagaacaagattttcctgcttttaaaaatactacattaaagctgaaaatttaggccaaaattttcaagtggtaatagttacaggcaattcatctttctggtcagaaaagggtgttactgcagctatttctgcctgaaactgggtggcactactacttttttttttttttttttaactgagcagacattttccttacactaaaattgagaaaaagagaaatttctaaatttccattgaacagttccttgcacatcattttaactctgtgagacagtgtcacatcgaaacgacacactacatcacgaagcttttctaaatgacggaggtggcttgcagctgctgacctcacttctcttggacttggcagcaatccacactgccttgatcatggcagtgaaaataagatagtattcagtattatttgtccaaatctggcgtatcattgcttgtggatacatgaatgatcttgggacttgaaaacattgctgatggaaactcaaacaagataaagggctaatgacattgataggaaacataagaagaaagttattccatgacttcataagagttgtcagaatttattatgcatgtaactacaggggaagtgcaaagagaagttgtttcagaaattgatgtaagggtaggacaatacattgtgcaagttgactctcaatgagactatttgtagcatcccacttttggaatgccatattctagagctcaaattggactgaaagatctgtcctggtgtgcctgccctgttgtttcacatggttacgattttcaggtgtagtgattgtgtggattattttctatttaatccttctagacccactttttacccattcccatcctgctttatgtcccagcatgctgctacatcatggatttcttatcctctggattctggagcagaagatggaagagtgagattaagattgacagttgacccttgaacaacacagatttgaagggtgcaggtctctgtccacttatatgtggatatttttctttttgtatatattttttattatactttaagttctagggtacacgtgcacaacgtgcagttttgttacatatgtatacatgtgccatgttggtttgctgcacccattaactcgtcatttatattaggtatatctcctaatgctatccctcccccctccccccaccccacaacaggccctggtgtgtgatgttccctttcctgtgtccaagtgttctcattgttcaattctcacctatgagtgagaacgtgcagtgtttggttttttgtccttgtgatagtttgctgagaatgatggtttccaacttcatccatatccctacaaaggacatgaactcattttttatggctgcatagtattccatggtgtatatgtgccacattttcttaatccagtctatcattgttggacattgggttggatccaagtctttgctattgtgaatagtgccacagtaaacatacgtgtgcgtgtgtctttatagcagcatgatttataatcctttgggtacatacccagtaatgggattgctgggtcaaatggtatttctagttctagatccctgaggaatcgacacactgtcttccacattgattgaactagtttacagtcccaccaagagtgtaaaagtgttcctatttctctacatcctctccagcacctgttgtttcctgacattttaatgatcgccactctaactggtgtgagatggtatctcattgtggttttgatttgcatttctctgatggccagtgatgatgagcattttttcatgtgtctgttggctgcataaatgtcttcttttgagaagtgtctctttcaaacaaatttacaagaaaaaaacaaacaaccccatcaacaggtgggtgaaggatatgaacagacacttctcaaaagaagacatatgtggatagttttcaataaatacattggaaattttttggagatttatgacaatttgaaaaaacagatgaactgcatggcctgcaaatatggaaaaaaataagataattttgtcatagctacataaaatgacataaaatattttagaaattagtctgttttattatttgctacaataaaatatacacaaatctattataaaaagttgaaatttattaaaacatatgtgcacaaacacagaccatacatgatgccatttgcaatggaaagaaatataaacaattctaaaaatgcagtattaaaactgcataacgttaactgtagtacatactgtactattgtaataattttgtagccacctcctgttgttattgcggtgagctcatgtgttgaaagtaattgcttaaaatgccatgtgacgctaatcatctctgcgtgagcagttcatctctccagtaaattgtgtatcacagtaaaaagtgacttgcaattctcacgtatttttcatcatgaataacaccatgggatctatatgaagtgccacgagtgatgccaaaagtgctctcaagaagcagacaaaagtcatgacattacaagaaaaagttgaatttcttgataggtaccacagattgaggtctgcatctgtggtagccaccatttcaagataaatcagttcaatgtaaggaccattgtaaaaagaaaaagaaaaagaaatttgtgaagctgttgctgcagctatgctagcagcaagaaaaccttacatttctggggaaatacctttttatctcgtattgagaatgcagctttcacatgggagcaggattgctataagaaaggcgtatctatagatcctaacatgattcaagaaaaagcaaaaaatattatatgacatcttaaagcaaatggaaggtggagagtctaaagcttaagaatttaatgccagcaaaagatggcttgataatctcagaaagaggcttgggttttcaaatttccagaaaacaggaaaagtatcttttgctgaccaagaggcagcaaacaagttcctagatgacattaagaaaatcattgaagagaaaggctattttcctgaacagatttctattgcagatgaaagtgccctattccaaaaataaaatgacacaaaagacatttattagtaaggaagagaagtgagcaccaggttttaaggtaggaagtgatgggctaactctactgttttgcacaaatacagtcagttttatactgagggcccctctttctataaagcttctaacccctgaggcttaaagagaaaagataaacagcagatgtcagttcttttggttgtacaacaagaaggtttggacaacaagaacacttttttctggatttgtcccattgttgctttgtccctgaagtcaggaactacctttgccagtaagagactgccttttaaagttcttttgatatgggacaatgccctggacaatggcccaaacccagtgagttcaatgctgaaggctttgaagcagtctgcttgcccccaaacacaacattccaactcagcttctatatcagggggtcataagaacctgtgaaggctcatcacacatggtactgtatggaaatgatcatcaatactatcaaagagaactctgatagaacatcatggaagtctggaggaaccacaccattgaagatttcattgttgttatagaaaaagctgtgaaagccatgaagcttaaaacaatacattccttctgaagaaaactgtgtccagatgttgtatgtgaattcacaggagccaatcaaagaaattatgacagatattgtagatatggcaaataaggtgagagtgaaaggttttcagatatagatattgaagatattcaagagctaatagacatcacaccagaggaattaacagaagatgatttgatggagataagtgtttccaaatcagtgccagatgatgaggaagaagacatagaagatgcaatgccagaaaacaaattgacattagaaaagatggcaattggattctgattatttaagactacttctgacgtcttcaatagcatgaacccttctatgatacaggcattggagctaaagcaaatgatagaaggattggaactgtatagaatcatttttaaagaaatgaaaactcaaaacgtcagagagaaatcacaacatacttccgtaaagtcacaccgactgtgcctgcctctcctgccttcccttctacctcctccacctctgctactcttgagacagcaagatcaaccccttctcttctttctcctcagcctcctcaatgtgaagactatgaagatgaagacctttatgatgatcactgccacttaataactgggaaatgttatgattttcttaataacattttcttttctctagcttgctttattgtaagaatgcagtatataatacacacaacatacaaaatatgtgttatggactgtttatgctattggtgtggcttctgatcaacagtagcctgtgagtagttacatttttggggagtcaaaagttataactggatttttgactacacagagggtcaggcttccaacttttgtgttgttcaagggtcaagtgtacatattgctcaggctccctccctgagtgttggctgccttcctctacatgaggccagtttctctccaaaagctctcttcagacagatacctttttcaagttccagtcactggcttcctacttttccttacctggcttacgggtaacaactcactgcggttgctagtcccagtttcaacaacaaacttgttagtttacctaaaccctgtctacacctttgtaagttacccttttattacactttcttcaaattactcagtttgtgcatgtcatcttttcctgccaggaccctggctgatatacaaactaaacctatgttttggatatgtgtctataaagcacatacttacaagtagttgtgtattgtattagtataaatacaaggattccatgatttttaaatatgtggaaatgtgactgtttgatgtggagatacttcatggatctttgaacacttgattattgcagaaaggagctgagctgatattgttcacattttccctaattagcagagatatatctcaaaaagattgggatgataggcttactttgtggttccatttctgcaactgcttcctggagttatgcaatcatagtagagtaagtgtttaaaaagatgatttaccatataaatatgtaacaattttacaagttttaaagatggaagatgagaagggtgcatatgtgtgtgtgtgtgtgtgtgtgtgtgtgtgtaggcatgacagacaaggttatagtttaaaagccagttattggtatgaaaacataaacaattatagtaatatgcagatacatgctttgcttgtgtttgacatcttgaccaaaatatttttcagttcctgatgctatgagaacagattagatcatctgagcacaaagtgaaaaggtgtaaggcttacttctccctaactcattagcaaacatggtaacttgttagacaaaaagaaaaaatacaaaattcacaaaacacattaaaaagaatgtttttgagaaagcaaagtactaccaagagcattatcaagatgtcagtaagtggaaaaatatgatgctcaaaagaaaaattgtaagttctatactactctaagtaaggcaacaggtaaaacttttttttaaagaaggggtgattccataactggttaagcagtagtactacatgatacatggaacaataagggcaatttgataggtggaaaaaggctaattctgatctctcaagaaagaaaggactatagttattgatgattttctgaagaatggtggaaaatgggctaaacattcttaatagatgacccatattctcactgtaagtatctgatatgtcacaagaaactttcgagatctaacaaactcatgacaatctccacgtctactgattgatgtggaagcaagtactatgatgagaataatgtgaaatattaaggaaactgaaatcttgtgcaaacaactgaagacttgggccacaaggaattgaaaggagttagccagcttgctttaggcagacagcaagggaagggtccctggagaacctctgacccgccccacaaatgcttacaccagatgttttatgcagataaggaaacttgcacagagggcttgcctaaacatgcccacagctgactaagggctcacatgtgcactaggggaatggggtggagccacaagaaattcacaccttatacaaatagggaatccagccccattagcatatatattcatgctgctgataaagacatacccaagactgggaagcaaaataggtttaatggactcacagttccacatggctggggaggcctcacaatcatggcagaaggtgagaaagacactttttacatggcagcagcaagagagaatgacagtgaagtgaaaatggaaagtccttataaaaccatcagatcttgtgagacttattcactaccacgagaacagtaaggagggaacagccccatgattcaattatctcccactggattcttctcataacgtgtgggaattatgggagctacaattcaagatgagatttggaacgtggagccaaaccatatcaagaggctttgtattcaactgggagggggcaaccgacgacctgctttcagaacccctctctttgctgataactttccttttgcttaataaattatactccactcactcttcaactgtctgcatgcctaaatcttcctggtcatgagacaagaacttggacctagctgagctaaggagtaaaaaattctgcattagaatctttaaactttatttgatctctcatggaaaaaaagaaattctatcaggtttacataaggaatgtaatttgattttgtggtctatgattgatgattctaacctgagtgtcttttgcatggggtggcccctctcatggattctgggaagaatgtttttcataggaaatgtacttccctgatcaaaagaacttttgaaataaaatatgacagaaaataaacgtcattaaaaaataaacaaaaatacacccaaacatgaacatagagccttttaaaagcaacagctaagacataaaaaacaactgtatgatttggctatggtgttgtatgcttgtcatcccagatactcaggaagctgaggtcgtgttactgaaacataagtgatttggtctaggtcctgctgtttagtgcacagaaagccaatcactgagacaatgagtattgccagggaagaaagctttatttggaggctatggctgaagaactgggaaatcagcctcaaatccatctctttgatccacaaatattagggagttatgcagcagggaagaaatgtaactacatgcacgtaaatatgaagtaggggtaagaaagaagagttggtcaacaggaagcaggtggtcagtaaggcagtcatgatgggtgaggggtctggtgtcttattgttcagattcggttatttggtaaatttcagttctttgatactatcagggaacttgaggcttaacggttgatttcctgagataagaactcagataagacaaatgtaactttctcaagtttcaagattgggagagtcaatttctatgtttattcaaaagaaaccgtaaacatcagttctatgagacaactgagccagtttcagtaccccccaaccctttctaataaatcaatatttatcaattcctcaatcattgtgaatctggttgtctgtctttctggttgctgcatgctgagggatggtgttgtgggcagctccataccatgggtgaccatgtggccacccaggaataaaaggttaacctaattttatttttttttcttgaaacacaatcattttctctccagttccccactttgatcgaagacaaatcacagcaggaccaatctacctgcagaataagcttcagtcccacgatacttggcctgattcctcacacaaactgcagcaagaatcattgtccatatcggctctcctaaattggctttgttggaacctctaacaaaactatttcagtcaaagctctgggaaaataaggagtttatccaactgtgctctgttataaaagaaaacagattcttattgaatttatgcaaacaaccacattgctctgaataaagaatattcagtttgtgaattccagagaaattaagcagagagagtgaaatatttctcaaattctgtatactttattcaattgttaaaggatataagtagctcaaagataaaaaaaagttctctggattcctgaaaaacaaaacaaaaagaatcacaaatgttcaaataaaaagcccataaattattccagtcctccatcacttgttcatgcaattaatacctactttgcttcatattgggttagtaattttcatgagcacatcagcctttttattagagtcatggaggtttttctctagttcaatggtaccatgtccaaagttatcagaaacctacaattaagagtccttttcatgaactccccccaaagagcaagctgtagattgtagctgattataagctactttttggggaaaaaaagcaaaaacaattgtggatgacaagtctaaggacagacacacttgtccaaaaatggttatttttgtggcataccaaaatttaatataatcgaccaggtgcagtgctcaaacctgtaatcctagcacttcaggagaccaaggaaggcagatcgcttgagctcgttcaaaaccagcctgggcaatatggtgaaactcagtctctataaaaaatagtgataaattagcagagagtggtgggcacacacctgtagtcccagacactcaggaagcggaggtgggaggattgcctgagcctgggaggtggaggttgcagtgagccaaaattttaccacagcattccagcccagttgactgagtgagaccctgtctcaaaaacaaaaaaatcacaataatcatgattatttctgacagcatatattgacatatcagaattttaagaatcttatacaatcctggaacacatatttacaacacagctatataaacataacccaaataaagttaaacactatctcacatttgaaattagtttgaccataaagtaaggtttttacgaaccttttataagcttttacagtttttttaaattaaagattaggtcattgcttgaagagaaccctattattctgacacaggggcccagacccagaggctggctttgcatcagtgtgcttttggtattaatttttaagttctagaaaaactcgaaactaatcttattccttaactaattgttccttaccatctcacatgcccacctcttctgcaataatctctgggcctatagaaattgaagttttaatttctcaatttaacacaagttccaacccattgtattaaagtggttaagtgactccttgcgtgtatctaattactagcattctattgacagaactgtgatcaaaggcatcaaaaatgcgatagtttctacattaaacttatcaatctgccagtgtatttctttacaatgtttcttaatttgccttcataaaaaaattaactttctatcatttaaaaaatggtaaatgcaaatatcagttttggaaattcagtatgagggcaaataatctcctttcacctaaatattataaaacaaagcaaggacaaagtaagaagcagcacgcaataatttcttttcagctattttaaaagagtattatcatacatttccaagactggtttttagatgcagtacagataactgattggtaagtttcgccactggaatcttcaaaccagtgcaacacttgtacatattttgttttcaactacacacatgaagcagtgataaatagcttgggatcaaaaataactagaaaatttcactccttttattactacttaatccaagtgaatgtcacttaattataataatggtaaacacaactaaagtaatttgagagaaatcaaagtcaatataattatcataaggagaaggctagtctttcctgaaccttaaaactttgtacccatatcatcatttttccttattacccaaaagaaaagatctgaaactgactcaaattattgatttattaattgaattaccttggatataatcaccatttaaacatttctgttcttttccaaataacacaataaataatgtactgtttctgctcagaacttataaatgtaagtgttttgttatttttgcaggaagcttagagctcttgtagctctctaggtcatcgaagataagcaaaaacaatttaattttaaatgactggtgtgctctctcaatgtttgcaggcttgacaaaggtagctcagaaactttaggtaaatagagcaaatcatgaactgtaggaaatgcacaggaaacaaaatgactatgcacagaaccaaatataagccctccattacaaactacaaaacaacaatggtttgtgtatatgtatatgtaagtaaaactcaaaggataacaaacagcaaataaatgaaaattaaatgcaaaaacaaataaacaggaaatcaacccccagtttttttcccactcagtttaccttggaggctacagtgttacccaggcccttaaaaaatgacaggaatgataatgcaaattaatgcatttaagtacacctcaccactatatacattttatgcaattaagaaattcacttaaagcatgtgaccagtaagtactttagtgctactactagctatgcagaatagtaattacaatgtgaaacaaagcaatgcaagcatttatgtaaaatttggctccatgttaaatctggcttcatgcttaactatattgagaacgattgccagactgccagtgtatttctttacaatgtttcttaattttcctttatcaagacttagagttttaactatgagcaatgttaatgagtcaaatttttccaaatttctgtcatgttttaaagaatattttactatccaaactttttcaactttctgttctctctgtatgtgcaggaagagagacatatagagaaaccagaaaaaaacaacatgacttacacaggccattgatgatgtgcttggtctttctgtttgttctaaattttctttgaaaaaaaccagtcattttattttaggacaaaagttcactatataagatgctttctcatataaaattatccttttctttataaccttttttaccaaaaatatatcttcacatccataactttctttacatctcattccccaacttactgcttcctttctcccttgtttcataaataaccttttcaagtccataatttaaattaaactttagataacttgtgaattatacaaaattattctttttctcataaagaacacatcttctttggcacattttatatagagaattacttattaactaatgttcctattcttactaatcttaaattttagtgaaaacctacaaagcaagaaatcctgaattatcaagtatttgcattttatagatgagaatattccacaacttttagaagcatatttccccatatcataacaatttcttaattgaaaatgactcagacatccaataagcaccaaaatgattttaagattttaaattatataaaaagtttacctgcaatattcatcccattttgtagatgtgtggtgttatttttgagttctctgttctgttccattggtccatatgtctattttggtaccagtaccatgctgttttggttactgtagccttgtcatatagtttgaagtcaggagcgtgatgcctccagctttgttcttttggcttaggattgtcttggccatatgggccattttttggtttcatatgatgtttaaagtagttttttctaattctgcaaagaaagtcaatggtagcttaatgggaatagcattgaatctacaaattactttgggtagtatgaccatttccacgttatttatttttcctatccatgggtatggaatgtttttccatttgtttgtgtcctctgttatttctttgagcagtggtttgtagttccccttgaagaggtccttcacatcccttgttggctgtgttcctaggtattttattctctttgaagagattgtgaatgggagttcatccatgatttggctctctgcttgcctttggttagtgtaaaggaatgcttgtgatttttgcacattgatttcgtatcctgagactttgctgaaattgcttatcagttcaaggagtttttgggctgagatgatggggttttctaaatataaaatcatgtcttctgcaaacagagataatttgactttctctcttcctatttgaatacctttctttctttcttttgcctgattaccctggcctgaacttccaatactatgttgaataggagtggtgagagagggcatccttgtcttgtactggttttcagagggaatgcttccagcttttgcccatttaatatgatattggctgtgggtttgtcataaatagctcttattattttgggatacgttccatcgataccaagtttattgagagtttttagcatgaatggctgtcgaattttgtcaaaggacttttctgtatatggtttttgtcattggttctgtttatatgatggattatggttatttatttgcatatgttgaaacagctttgcatctcagggatgaagctgacttgattgtgggtggataagtttttgatctcctgctggattcagttttcctgtattttattaagaattttcacattgatgttcatcagggatattggcctgaagattttatttgttgtgtctcttcctggttttggtatcaggatgatgctggcttcttaatgagttagggaggagtccctcctttccaattgtttgatacagtttaagaaggaacggtaacagctccttttcatatttctggtagacttcggctgtggatctgtctggtcctgggctttttttgcttggtaggctattaattagtgcaatttcagagcttgttattggtctattcagggattcgacttcttcctgctttagtcttgggagggtgtatgtgtccaggaatttatccatttcttctagattttctagtttatttgggtagaggtgtttatagtattatctgatggtagtttgtatttctgtggtgtcagtagtgatatcccctttatcatttttattgtgtctatttgattcttctctctcttcttctttattagtctagctagtggcctatctattttcttaaaattttttttcaaaaaaacaaaacaaaacaaaaaaaacagcccctgaattcactgattattttggagggtttttcatgtctctatctccctcaattcttgtctgatcttagttatttcttattgtctgctagcttttggattagtttgcacctgcttctccagctcttttatttatgttacagtgtcaatttgagatctttctagctttctgatgtgggcatttagtgctacaaatttccctctttacactgctttagctgtgtcccagagattctggtacattgtctctttgttctcattggtttcaaagaacttcttgatttctgccttaattttattgtttccccagaagccattcaggagcaggttgttcaatttccatgtaattgtgtggttttgagtgagtttcttaataccgaattctaatttgattgcattgtggtctgaaagactgtttgttataatttcagttcttttgcatttgctgaggagtgttttacttccaattatgtggtcaattttaaaataagtgccatgtagcactgagaagaatgtatattctgttgatttggggcagagagtactgtggatgtctactaggtccacttcatccagagctgagttcaagtcctgaatatccttgttaattttctttttcattgatctgtcaaatactgacagtggggtcttaaagactcccactattattgtgtgggagtctaagtctctttataggtctctaggtacttcttttatgaatcttggtgcccctgtattgggtgcatatgtatttagaatagttagctcttcttgttgaattgttctctttaccattacataaaacctttctttgtcttttttgatctttgttggtttaaagtctgttttgtcagagactagaattgcaacctctgcttttttgtttgtttgttttcttttcatttcctcggtaaatgttgctccattcctttattttgagcctatgggtgtctttgcatgtaagatgggtctcctgaatacagcacactgatgggtcttgacttcttatccaatttgccagtctctgtcttttaattggggtatttagccagtttacatttaaggttagtattgttatgtatgaattcgatcctgtcatcatgatgctatttggttattttgcacactagttgatgcagtttcttcatggtgtcattgttctttatattttggtgtgtttttgcagtggctggtacgagtttttcctttccatttttagtgcttcttttaggagctcttgcagggcaggcctggtggtaatgaaatccctcagcatttgcttgtctggaaaggatttcatttctcctttgcttataaagcttagtttggctggatatgaaattgagggttgaaaattcttttcttgaagaatgttgaatattggctcccaatctcttctggtttcaggtttctgctgacaggtccactgttagtctgttggattccttttataggtgacctagcgtttctctctggctgcccttgacagtttttccttcatttcgatcttggaggatatgatgattatatgtcttggggttgatcttctcatggagtatcttaatggtgttctctgtatttcctgaattttcatgttggcctgtcttgctagattggggaaattctcctggataatatcctgaagtgtgttttccagcttgtttccctactccccatctccttcaggtattccaatcaatagtcgtttgatctttttatgtagtcccatgtttcttggaggctttgttcattcctttttattattttttctctaatcttgtctgcatgccttatttcagcaaggtggtcttccaactctgatattctttcttccacttggttgatttggctattcatacttgggtatgcttgtgtatgtttcatgaagttcttatgctgtgtttttcagctccatcaggtcatttatgttactctctaaactggtttctctagttagcagctcctctaaccttttatcaaggttcttagcttctttgcatttggttggaacatgttttttagttcagtggagttttttttaattacccatcttctgaagcctacttctgtcaattcatccatctaattttccctacacttctgcgccattgctggagaggcattcgatcatttggaggagaagaggcattctggcattttgggttttcagtgtcttttcattgattctttctcatctttatgagtttgtctagtttggatctttgaggccgcttaccctttgatggacattttgtggggacttcttttttattgttgatgctattgttgttactgtttgtttggttttctttcaatgatcaggtccctcttctgtagggctgttgtagtttgctaggggttcacttcaggcactattcttctgattcactcccatgcctggagatgtcacttaaggaggctggagaacagcaaagatgttcctgctccttcttctgggacctctgacctcaaggggcaccaacctgatgccagtaggatcgcttctgtatagggtgtctgacaactcctgttggaaggtctcactcagtttgggtggcacacggagcaggacccatttatgaagcactttgtcccttggtggaggaggtgtgcttcattgggtgaaactcatttgtctgggctgcccagattcctcagaactaccaggaggagaggctaagcctgctggtccacagacactgctgctacccctcccactaggggctcaggcccagggatatccaggttctgtccctgagcccctgagcctctggctggaattataggagttcctacagggaagccccactcagtgaggaaggatgggtcaggatcaggcctggagagggactctggccacagactaccacagctggtgtgttggggtgtggggacaagtcttgggaccaagccatccagcctccctggctccagcaggagaaaagtgcagcctgaagctaaagagatgggtgccacccttaccccacccagggagcttagcatgttaggcagttgcgagtcccagtgctggctgctgccccttccctaaggagctcaaatgccttagacagcaggcagccacagccagtgctggtcggctctcccccaggagttcggtaggcttaagcagagtccagctgagaggctgtaaaaatctgcacattccagggttcagacgctaggccttccaatccatgggttgcacacttccctggaaaaagcacagatttcttggctgggtagcatgctcactcaccacttcccttggctggggtaagggggttcccctgccccatgtggctctcaggtgggccactgcaccacactattctcccttctctccatggttcaagccagccttctagtcaattttgatgagagaacctggataccttggttgccagtgaaggattcacacacttattatggttttcttccatgggagcctctgaatgctgctgcttctaggtggccatcttggccctgctccaacatttctatttttatctcaccaataattttaaagccagcttgattattaaagatttacttaagtcatgtgaacttgaagaatactttggacttatttacttaatttgtgagacacatcatataacataataaatacacatacacataaacacatctaaacatatatgcacacacaaagatccactggcttttaccttggaactctagctataagatagcaatacaaactcaccggtctacaaacatgttcacatggctaaactttgtttgcccaagtaggtcatccagtgaagggcatgaaccaacattttgggtaaagtattctccatgaaagtttgagtttttaaaggcaaaacctcttcagattccaaaggacagcagggccaaacagcaccacagaagaacatcatgtattgaccaggcctactcctgtttacataaaagactggatacatgacattccgtcccactttcattcaacagcaaaatgagacctatggagaggccaaacttctccagattccaaaaataatgaggccaaacagtatttcaaaagaataccagtttatcaaattctggttttccatgactatactaaaacacatacctaaacaatcaccaaaacacaatcccactgctgcagcagcaaacaaatcccaagagtgtccaagcagaaacagggtgctttgctctcttcattagttaggcttgttcaatctgcaaatggaaattctttcagaattccccaaattgagaagagaagataccattgtctggtgcccacaaaagatattcacccatctggacacagacgacaaatttcaaaggctgtttttcctaagcaatcaggaacacagttggggccagcagcggcaggaccagagagagatcaaaacccacctctggccacaaaatggggcaggcagctgcttaggagggcttttgaagctcccagcccatttcagctgagccaggagcaacacgttcatggtcagggagccaaaatccgttaccaaaacaccagaggttttgtctaggttatactgctcattgcacagaaagccaatcactgagacaatgagtattgccagggaagaaggctttaatggggtgctgcagccaaggagatgtgagattagtctcaaatccatcttcctgactgattaaaaacaggggtttatacagcaatgaagaaatgtaattgtgtatggaacagcaggaattacggagggataaagaaaaggagttggtcaacaggaatcaggtggtcagttaggcagtcatgacaggtgaggggtctggtgttttactcagatgcggtgatctggtaagttttagttttttgatactacctaggagttctgatggttaatttcctgagaaagaaactcaggtaaagcaaatgtaagtttctcaagttttaagactagaaaggtcaatttccatgtttattcaaataaactgtaaacatcagttttatggaacaattgaaccagattcagtaggaggattgcttgagtccaggaattcaagtctgcaatacgctatgatcatgtctgtaaatagccactgcactccagcctgggcaacatagagacctcatctcttaaaataaataaagtaacactgctgctgatttgaatcaatcccttagtggaatgataatgttgagcttctcagagatcaaagctaaaggctttttgtgttcattaacctgtgatgttttcacaatcaataactggacaaacttctctccatctaatgtcacattagtgagtttgacctcaaatggtaaggatctaattaaagctgtatctccctttctataaattgcttagtctttttgaaggcacaatagactatattcaaaaatagctaaagaacagagtttaaaggagtaaattaagcttatttctaaagtgctgtattttttagatgatcattatctgcccccatacttattcactaacttttcagactgttggtgtcctttacaacttaagacactcccatatacctcagacttctccccttaaaataatgagatttcaagtttcagcagaaaaatgatattgtgggacagtaattttactacctgctgtgactttatctgaaatgtactggtataattatagtaaagcagacatttatttatatttgtgttttaagttataacattacaaacgacctatttataattttgcaaaacaataaaaaaatctacttaattagtttcttttaggttctaacagacatatgttcagaaaagagcaatggcatccagctgattttatttataattaatgtctttggagaggtgccatttctttaagaaaacagtttattaattttgttagaaactattgattgcttttgtgagcaattggcttatctttattttattgttactgtgatccatgtaactaatgaccaagttacttaatccacactgatatgaccatgtttcttactttcttgagtagaaatctcagatcttaatgaatgtctcatctttaatcagtggaaaagtcccataccaagtattttgtccattaacctcaagcatggcttcacttttttcccccaaatttattttttctttcactttatatattaaatgtttataatctctttgtgttgtgtctatttttgtaaggcaactgaaatcctttttgaagcagactggggtataaataaatgatacagataaaaaataggtagttgaatagatggatcataagtaggtaatttagaatctagtctatattaaacagcacaactaaaaagaactgtggtgcagttctttgaaaggccattcccatctctcttctgtacataacagcagaactgatgcttgattcccattcccctcttaattggtctcgaaattttggaaaagtcattacatttctcttggcttcagtgttcttatttgtcaatgcgggagtgattgaatgatatttgaaatccattccaactttaataacatttggggatgaaaaatttcaccagtcaaagcttgtagagagtttctatgcagaagcatgccattaataatcactaccatgtaaaaattactgctactttcttattgcaaattaagtttgttactttatttaaagttttattttattttttaattaattaattattattattatttacagaaacagggtgtcactaagttggccaggctggcctcaaactcctgaactcaagtgatctgcccaccttggcctcccaatatgctgggactacaggagtgcatgactacacctggccttctttttaaatttagtttaattttatcgtattaatttatttttgagactggatctcactctgtcaccttgcttggagtgcagtggcacgttcatggttcactatagccttgacatcttgggctctcacctcagcctcccaagtagctgggactataggcatgcgccaccatgcccagctacatttttaaattttctgtagagacagggtctccttatgttgctcaggctggtcttaaactcttaggtccaagcaatcctcctgtcttggcctcccatagtgctgggataatagtcatgaatcaccacacctggctaagcagttttcttaagcagagcatggagttaccagatgagtaatgagattgccttgttgtggaactctagattagtctgaattttcttgttgaaattatggcaccaaggatggaggtgagttccattttaagtcagaggatggagttaccagatgcgtaatgagattgccttgttgtgaaactctaggacattagtctgaattgtctggttgaagttacggcacaaagggtggaggtgagttccatcttaagtcaccccaggtaggaggaggttggtcatagatcagtgatgatatccaacagaaatgacaggaaaaaccttagaagtagcaaattattcccaaagattgctttttaaggaaagtttggttgttcttctataatagaagcaatccatctttaagatacaaatgcttattttaatgtaaatttttatatttagagttttcttaatatttggtgttgtcttctcctttttatagaatttgaaatttcaagaccaagaaatgtacagatgccagcaggtgccattatctaaaatatgttcccatctataaattcttactccaaagcttccaatgccactttaggataggaaggtagtagataggttttgttttaagcagccagtgccctcatgtctcagttgtgagtggtgggtactaacagctcacagactcacccttctgagaattcacctaggttgataggagccacctcactatctggggcacagtctggaatgataggccctctcccagggggcagcagctggcaaagatcaacagataccagggatgaaaaaggccagcctcgttgccttaaaaaggaataagtcattcatgccccagagctcctcacgggctcagggtggggctagacttcaaatgaaccatcttctccactgccgtgcctgggtgcctgcaaactacatttcccatattaccctgctagctgtatccctgttaaattcagccaatgggaggcactggggacaagttagagggaagataaatgaaggaacatttagttattgactccaacggttgttatcagtgatgaatccatatgggtctgcagcaaattctgcagcaaacacctggccaacatggtgaaacctcgtctctacttaaaatacgcaaattagccccaggtgtggtggcacatgcctgtaatcccagctactcgggaggctgaggcaggacaatggcttgagcccgggaggcagaggttgcagtgagctgagatcgcacactgcactccagcctgggggatagagtgagactccatttcaaaaaaaagaaatacatattttaaacttttagctgttaaaatccattaaaatgtgttagggtgtttgcttcactgacagaaaaagaacattcctcaacatatcaagaaattcctcaacatatcaagagtttgcttctatgtttttcactgcactcactgtctgccatgttatatatgttctgccctttctgctacatttaaaaatatgtgcatatttagatattgctaagcatgattagtatttatgtggtcactggcagtaaaccaagataaaacattataaaacaagtgtcaataaattttccctccttctttgcattttattttgatgtaaaatttctggttacataaaagttatggtaatcagccatatttgttggatttaggtagatagctcataacagctctccacagtcccactgcctctgaatggatgacctcattctcaacgtggaataccggaaaaaagttatcaaatcctaaagtttgtgtggaaaaccactccaaaaaactgagaaaatagaattcttacctatgtggacaccacttcaaaatctcatgtggattttccaatttagtaggtatacctgtcaaaaaaacccatcactgactttggaaatcaaggctgctggcctcgctctggttatgagactagaaagatgcatgtttttgtgtgatatgtattcgggaactagactggtgaagtctatatgccgtgtagtagctaccggcatccctcatcctccttaagtacaacaaacctccattttagacccaacctaatgtactcaaggtagcagtggtcaagccttcagctgactccaactagaaaacactcaggaattactgacctcatgaatttgcacacctcctgcaacttccatttgtgagacccaaataccctgcaagcttggctatcatacggtatcattgatttcattgttttgccgttgtagtgcccctgtttgccagcaaatgtcataggaacattcacactgtaaaagctgggcaatggaatgataatggaatattatttccctaagtcacagaatggctaaagtatgaagtgttccacacaagcaagtactagagagcattttgttggaggattaccagggtgagtgtactgctatccaaatactcaagcctgtttttgcttaaatctctaaggaatatagttttccttcctcagcctacaagaaggcacagacaactttattgtatctatctattaaaagaggcataaatgaaagcaggatcaagcagtttaaaaaccaccgcaatgagaacataaaagtgtagaggactcattcaaccttaaatcgcaaaaccttcatactttagaacattgatgatatggctgagcatatcctcccttaggggagaaaagcccagcgaagctcatgtcagggtaaaaatcatatttttttacttagttctcataagcatatttgattgataatttaaattaatgaggcagtgggaaaacttcacttggcattgcaaatggagcacagaaacacatgattcagtaggaaaatagatttaatagctgtgaacataaaccatattgctataaagatcaaaatagtgttttcttcttctacagcaaacaaaataaaactaacagtaaaggcattcttttgatatacctagattataccataaataggacaaaactttggcaataaatactatttttcaaaaagtcatccttgacactgacctggaaagtaaaaaaggtaatattacttatacagatacttaatttgcacacaaggagaactttagtcctgtgactttttaaattgacagtgtgtattatattaaaataatatgaaacttagaaaacacattgaaatttgtttaggctcatttgtattaaccattttgttgagtgtttctgaacttttcccgttgagtatgctaaagtatttgaaacatagaaggttggtttgacatgaaagaaaactataatctatataacttaaataattagcatattttgtgcagggaaagttatcttcaatattcttcacataggcaaaattgacaataattagaaacatcatttaaagatcatcttagtaacctgaaatgtgaaaaaggttttctcaaattaggccaaaatttaagctgctttaaaactcttttccttccataatataaaattacacatccaatttaattaaataaaaagaaataaaaatgagctagattctgctttggtaatcttaagtcagccagttgtgcataacccatcttagaaattctatcagcacacgtatttgatcagggtctcctgaaaagaagactgatgtaactaagacagtgaaagagtgaaatgcaaagaaaggtgaaatataagcatcctgtctggttttgaaaagtaaattaatatttctactagaacttagacattgtttctattataagcacctgaaaattttccagtaattgtccaaatatcaggtaaatagaactcatccattaacataaggcagtttatagtgtcccaggagatatcgactagtaataaaagacaagtttattaaccatacaaagctggaatagattatcctcaactataccttattttaattagtgtggatcaactacttgttatatgtttttacctttagtaattactaaccgtaatcttctgaatcataggacagtaaacactaaatttcttgctttatttccaccatttcctaacttgcgggaaaaattgtgctgtgtatctcagtactaatcctttaaaaggcaagagctttgattcgctaattgattctctctctctctctctagcttgcctctctgttctttactttaggtttagtgtttgccttttttttttcttctcaatagccaaattgtatttctcaatttctgcctcaataattttggcttcagttcagatatacagaggatttggtaagttttttgctttgagccatggttcttccttttgctttaacactcaaccacacctacaaagagaacaccattgttccctgcattatgatttagaaatggcaaacattggctggcgcagtggctcacgccagtaatcctagcaatttgggaggctgaggcaggaggatcacctgaggtcaggagttcgagaccagcctggccaacatggtgaaaccccgtctgtactaaaaatactagctgggcgtggtggtgcacacctgtagtcccagctactcgggagcctgaggcaagagaatcgcatgaactcgagagacagaggttgcagtgggccgagatggcaccactgcactccagcctgggtgacagagctagcctccatctcgaaagaaagaaagaaaggaaagaaagggcaaacattaccctctttaagccacttcaggtaacttgatttcatgcagagtcacatccagatttttatcttccctgcagtctttcatgttcctttaagtgaaatgtgtctttgttttgttctctttctcattccctccttaatttctgctttcatgttcaaaatagattttattatctgttattatctgttcccagtaagactcagctcaaactctatcaactattagaaaactatgcaaatagattaagaaaagcttttattgttgccctcaaagggatggcaatctaatctttccaaatatggaacaacatacaggcaactatcaaaaaggcatgagaaagaaaagaaactttttatctgaggaatgtcagcccctgccccacaggcatcccacctaaggtaggtaatcatctagaagccacctgctgtatagactctagactcagtatcaccatcagtagctataaattaacctaaaactgccatacgctggacacaataactcatagttccacagtacatagccaatcactaatcaatgttatctctgtaaaccaacaagaattcctgagaaacagattttgtaattgcctccctactgattcgtccttttttctttaagaactcaagactctgttttgttcatgggagtacttcccaagataacttaaaagtgcttcctgagctgcagtcctcagccctagcccaaataaactctttacctttacctatatttattttgtctcagtttcttactttgggtcaatggtcacattaactttgtgtatggcatgagcaatggtgtagggaagcaaatgtgaacctagctcgaggtgttgtgttactccccgaactctgtggccctgagtaacttaaagacttctatacatttaagctaatccatacatagcactgaaggtagttttgagaattgatttacataaggcttctgaaagtaatttataaactataaaaactacacaaatgcttattttatcatttgctttgtttctttaaattgtgcgcacaacacagcagggagcttcttctgttagctctttaatagcccctagcaaatttacaggcagaattcaataaattttcagtcatggaagttagcagatgttaaagaaaatcatttgaatcattcctctagttacaaaaatacacattccagtgtgtttagctatctgtaaaattacagtagcagtggttatgaaatagcaaagaatgactttattcatctgtgtttagaatataaaggctgagaaggcgtattaggggtagcagagcagtattgaatgtaaatgcgcagcaagagggagaaacgatgatgttgtcatactcttctggcctcattactctgaaggaactttcttttccttaatgcatctatgcaactccctgaatgttaatgaaagtggcatgtgcccaatgaggagaaaagagatctaagattaaaaaccaaccccaatgatgcacgtttcataagctgatcttactgttccatgcactacttctttaaaattctgtttttttttttttaaggcacattagcagtgtctatttgatgcctagaaaaatttcaaatggaagaaaagatttgtttgaaaaagtaaggggtgaacagtttccactgcaaacaaaaacttctggtcttagaactgtttttgaagatacataattttgatagtttttacagaaaggtaggggtgtaacttaacagttgtttgtccaagacattgtcacgtgcaccaagcattttgctcctccatgtccaatcactattttttgttgatgttgttgttgcattcttatggttggagagtggatcaagtgtatctggttgcagtttcagttaattttaagatcatttgtatgtccttccattgtcatttggaatctttttaccacttggaaaattgcactcaatatgtcgttgtccaatatcaaggccaagagccctactcccacattttaaaatattgtaataatctatcacatttggaaaggttataatagagaaccatcattggatctcttctcaacaattctgcatatctttaggacatcttttcttatatgctacccagaatgtggctggacttcactttaaagttgtcttgaattaagcaaaattaggaaagtgaataccatatatgggaatcaattatcaaatattatgttatctactctatttgataaattacatcactgtcccttcaattacaatagatacctgacaaataagcgtcaccatgcttataccaaaatgtgaattttttaaaaaagattaatgctagcttccatgaattcattattatttaaaacactctttattaaagtataatcttatactatgtacatcggaattacctggatgctttaaaaatgtttcccggtcaccagttctggaattctattaagtagacaaaaggggtgtgtagatattactgcattattttccgtgaagcgtgaaactcataagtagccataaaaagaaataaacattcatggaatatatgaccatcgctgagaaccaaaacttgttaatttattaatttgtaatttatgtgtgtattacaaaggacaccgtgatagaatatggtttgcaaaatatatagtacatattaaatttttaatagttacctaagcaatttctccaactgaagtattttgagaaaacaaatagtttagtatcaagtttaaaataattagttcttcatttgaagtaaattttgtaatgatagcttactatcggctcctgaatacactttagacaataattctgctaatataatattaattatttttctagcaggatatgttcttccaactccatgttgtttttgtcatccagagtcttggaattctactcttacagaaaatagataaccattttatttatcttcttggtgttgaatcttccaatgctttcatcacttaaatcaaacagtcataacgtctttgattttattgtttttagcagctgtaattgtattttactctcagaaacatgctccaaagcattgcttggtcattttaataagaagttaaagtgctactaatgtagatgtctgtgacttcaaaacaaatggcagaaaataaaataactttaatttttattacttcaagttgtatttttttttttttgctttgttttcagtcctcacaataaaaacaaaaagtgggaggaagagatcttaggaagagaggaagataattttttttttttttttttttgagatggagtctcgctctgtcacccaggctggagtgcagtggcgcgatctcggctcactgcaagctcggcctcctgggttcacgccattctcctgcctcagcctcccgagtagctgggactacaggcgcccgccaccacgcccggctatttttttgtatttttagtagagacgcggtttcaccgtgttagccaggatggtctcgatctcctgacctcgtgatccgccgaactcggcctcccaaagtgctgagattaaaggcgagtggaagataattttttaaaaagtttattcggagtacatgttctatgtttcctgcaggccctgtgactcatcctttatagcatctagtcaagctgatcagcttctaagaacagatggaaatgaagcccttcctcactataatgcagccattagatgattatccagtccattcagttctaagtgcaaattcactatcattttatttctaatctatctacctttaactgatgtggcgagcaatttgactttacttggcttactattgtgtttctgttagaaagtaatgtgatgcacatacctaatatgaaacttttacaacagagaaagagattttaatttaaaatagctttcttactagagcttggaccaagttcattttcagaagttattaacaagatgatacaggtatcaacataaaagtgcaagggtagttggtcatttgattttgcattcagatcatatattttattttcattgtaaaatatttgaactactcaggatccagtttatgagggctcttttgtgtgactgttacaagtagaaacccataataatataaccaaggatgtgaaattgctttatgctaatattttaacctgtgggagtgtactttctcctactctttttttgaaatgtacagcctcatagagatgcataatttttacctactcattcttagtagcagaaaatgagattatcagtatagtaagaagcttttagtaaattaaggaattaaaaggatagtagtctctttatcaaataccaggattatgactactcctacctcctcttccaatttttttttccgttgaggttttataagtgatttgcttcacagtacagatgtttttatagatcagcacctgcaaatttatgctcatttgagtctatatttatgtgacagctgtcagtctgaaatcaaagctttgtgaatcatacattgagataagctcaattaactacatcaagaaagtttgatagcaaaagtggtccagaaacatttcatcatgaagattgcagaagtcattgagtccctagacacaatccttgcatctaaagtaacagttatcagttttaacacaaaaagtaatagatgtagaagttacttgaaataaaaggctaaaatacaacctttgtcctaaatgcttttgtaaactgatcaaggactcaaagcccacatgccacatccatttgtcacacagttattgaaaaggagtcagtgttgactggtgcacttggagaagtctttttgcaagagtagagtgaatagtgagtactgactgatcaagaggaggcaaatacatggaggaaaaagagaaagatcattttagactgtaaattccctgaaggtagaaaatatatctcttcatattatctgtcaagcatctaccacacaggttggctgaattattttgaagaaagtttgggatagcgcaggaagaaaaattatgaagtgtgcaggaagtggcaaaaattgacctatgttgagtggagggtatattctggaatgattaatgtggatgcagagggaagatcatgacattggctgtattataaaagctgaaacagcagtaaagagtaattataagagatgatgggtgaagtagtgattactgggtgtcttttcagtgaaatgatgagtttatctggttgtatagaaaggcgcaccttagattgtttttctgttgactgagctatattgcagctgagtagaggtagaagttaggttgtagaaaatttgtgactatgcaaataaattttgattgtttgagaaaaaattggttccttctctgtagaaaagatgagcccaaagtttacattttattgtattatatgacattaaccagttttgcatttactagcaactgcagttcagcattcctgattttatatacacagcacacacacatatacccatacatatacatttatatgtatatattctgttctctcttgaactgcttttaacatcttactgattgtctcagccattaattccctcactttaatccttgttcatttcatatttgaacaagaatcataattttgcctttttgaaaatttaacattagcagcaggatagattgtctggggaagaagtttgtaagtctagagatcaatcaagactgttttaaggaattctatccctcagtactcaaagtaggaagttgaggtcctacatttgggtaaccagcatattttggaaaataatggaaaacctgagacgttttgaaagcaaaaccagaacagaattttttttgggtgtatatatagacaagtcagaggtaaagttgtagctcgtaagccactcgagggaaagcaaagatctgggccacccttgatcttttttctaagacatgatctaatattttatgaaatgtatccccaggaggcttaggtgacttgcttcattctctcctctgggagtgttccttgcatcatattgtgccagggagttgctgccaggtcttagaagttgcttggatagtttacaaatggggaagtacatattgataaagctggaaaaaaccttggggaaaaaaaaacaagtgaaaatacctcagcaacaacatactgttaaaaatttctatttacctcttgtcaacaaatacatctttaaatacacaaacatttttaaacatttaaatacaaatacttttaaacatattactgtgatgggaagaatgtaagcaacctgtgttcaatgaaaataaaaagtgatgtaatttatgacattcattcaatggagtattatttattcatgaaaaagtatgcttgtgaaattggtattttaacagtcatttatggtatgatttatatggcagattactaaattgcaaataaaatttgacttcaactaagtaaaacagacaaacaaaaatatgtatctgctgattgagactccaatgttggccccagaaatttgtatttatgaatttctttcagataattctgttcagcaacaagatttggggatcattattcaaattcaacagattctgattcacaataatttatttagcaatctgctgtcttcctgcctactgatacatttatcatttcagaagagagagcaacttgcatgattttaatagggtaaatttttgggaaattttgatttcttagaaatttattcagtaaatatgatcgagcatctactatgtgtgagacatgatcacagaggcactgaggatacatcaacaaactccaaacttggtaaacataataagtaatattcaccctttatttaaactgagtcactagaatgtaaattactatacgtacattccagtggcttaaattctaatgactcaatgtaaatacatgaagagagaactttacatgttaatgtcccttatctaaaggaataacgtgtatgtatgacagagtagcttctctacattcttgcccaagcatagcagctttagcaaacgtgtacataaggctgcctatgtatccagcactattctaagcatttcatatgcatcaggatagttaatcacattttattatagtagagtaaaagatgacaggatagtatattctgtctttaccagcccctcacccaacactcagctgctcactcactcacggacaagaatgcctgaggaagccctggtcatttcactcaacattccctctactttgactgtgctgggaagtctttacctcttttccactatcagcaatcccccctctttctttccaattttcttcttttccagtcaacgactacatgcccactaaaggagggctctaagaagtggtcctccacctgcaatatctcatataaaatctgctgtaggtctatgatggaggaattcatacagtgtttaaagataagaaatacaaagcttagaatgctgaaaggttcataactagcttcaaactctgtattatggttaatttccatgtgtgatttacaagtgatactaatatgctcttgatttgttttctaaaattaggatcttaagaaccactgggttggtgaaagaagtattggatgaatctgtgttttccaaattcaaccaacttggacaaacatagtagatgcaagttattagtaaggttctagttatctgcttggataaaagcctcatgagtgttcattatcttgttatgctttataacagacatatgttactctattatatatatgttatctataagatatatataatgttatatataatatcaattaaattaaaatagatcaaaaaaaggaaaacaataatacaaatatgcccatttaaaaatctggatagaataaacaacacaattgaatgataaccttagcatattatatttgaaaatatacaaattctaagctacagtttatcccttcctcatttcttagatcactgcggttggaacactagttttttagtagaacttatatttctatcatcgtaagttttggttgcataaggttattaatagttaaacaggtttctttgctgcttgatatatttattatttaaggtgcaggtttagctaagctgcaaaactatagtggcttaaataagatataaatgtatttctcttgcatatttggtccagtgttgggcagaatatctagggcaggtaggaggctctagatttcatctctgagtataagtagctcctaaattgttacttcttcctgacttcagaatgtgaagtgaaagtaagcagcttcctttccaaagaagtgattcgcaggtgcacatgtcacttcctctcatgccccattagccacgtgaccacaaccagatgcaaggaaggctgggaattgtagttgctagatggggcagtaggagtgaggagggaccccagggattctacgattacaatgagggaggaaaaaaaatggatattgggcagataatattgaatcctgaaaaacaaactctaaatatggaaaaagtgaagcatcctttaagtcctttaatgtagatgtagaatctgctcttcagtggtcctaataaagcagggctttgtatttcatcgtccttttcattcataaaagatactcatttttggtgtgtgtttgtgtgtgtgcatgtttgcgcacgcgtgcatgttcatgtgtgctatcaatggctttaatttgattgaagataaaattaatactaggaactgaaatactttcgagataggctgtgcacagtatgacgtcaccactttagctgtcttatcaaattcagagcatacaattcatgtaatccttgtttcccttccacattgaccaaggtaagataattccaaacatagcttaaagaaatgtcttatactaagcttcagaaaatatcagaaagttgcattatcagcaatgctaatgtagcaaaaagcaggtgggctcatgccaatgttctcctgagagatggttatggaagtagattgtggtaattaatgagtgagcagttgaagagtaataaaaaagaaaaagtttaattaggagtaaatggtaagggagtttaagcattggaggaataatattaacattgtgggaagtagattgaattatgtttaagatccaaaaatatttgaagctatcatcttatttccctctttatgtcacgcctaagtaggaatctatatgaagctacttttacatcatacagtttgtttattcctttattattagtgaattgctttagactaactctatcatacttccaattttgttatctacatgatttcattgtcctttgatataaatctacttttcctagcttgtgagcaaaatttagctaacataaaatcttatttatgtatttatttaattaattaatttatttttttgagacagagtcttgccctgttgcccaggctggagtgcaatggcatgatctcagctcattgcagcttctgcctccccggttcaagtgattctcacctcagcacccctgccgagcagctggaattataggtacatgccatcacgcctggataatttttgtatttttagtagagagggggtttcaccatgttagccaggttggccccgaactcctgaactcaagtgatcctcctgcctgagcctcccaaacagctgggattacaggcgtgagccactgcacccaatcaacataaaatctttaaggcattatttgtgtttaaagtagggtggggaatttctgcatccgaaattagtcaattgacagtgttctacagcatggagtatcagaaaggatatctgtttctccaacttatgacagcacacatgtatatttttgcctggaggagggagggatatgaaaaaagatttgagaagagaatgaagaatctgaacttttgggcaggactcatgtataaaatgactgaaactttttgtttgttcctttgttgaaggttagtcttgcacagagtaaattatggtaccgttgaatctcctgggcaccctgagttcagtaaaacttataaagattctttaaatcatattatactttctcttctttgtatgatagccttgataagtgcaggggctaggactactgcaagtagtgggaaattaggaaggcttgtcagagacactgagggcgtctcaaggattctggataggaatgtatcagctctaggatatagctgcgtttgttgaggtttttggcttgtccacagctgaagatatttgtaaagatttcagtaacttcaagacccaatgtcatccattctattaaaaaatggaagattatacttgcttaggacctcttcaatctcagcattattctttgtaaaaaattctcctccactttaaaaaatgactcttgaccatgttgtctttactattattttcttttggaaaaacacacaattttttcttaagaaaaaaatcatttccctgcttatttgtcctcaaatccatggtatattaaataaaaatgacttatttattacctttctaatgagccactttcataaactgtggttgataaaacaacttttggaactacttgcatattttactggtaacatttcatctagaacattaaaacatttaaggtttttagaggtattcaaaggagtgatatgtattcatattgcatgtgttcacaatagtgtaatctttccttttcttttacatcctcagttttattgaactagaggaaacatcccccattcagatacaatactcatttttataaaacatttaggcaaaaaagtcacaactaccttacataaagcctgtttaaacctctcaaatttcataatccgatcaacatttacattcttatattctggtcacaggaacttttattccctacccccagaccattttagcttttctggtgaaagagaatttaggttcctatcagagagtggatccaaggcactcaggcctttttgtcaacgtttgtcataatttgccttattgttgccccaggcaatgtcagctttctcattataatctttgccttttagttttccgtaaatttccccagtctggggcaaatgcagaaaactggtgtgggccctttaatgttgggagaccagcagggtttccctttggttcacccaaccattaatagtgttgttaagacctttgttttaaccccataaattttcattgtatttatttcatttcttaataaccgtcgaaagattttcaccacccttcaggggctagtcctttgagtcccttttacctttccaattttttttgttgttaattaccttaatgttttattaagcatctgtaagacccatgaaggatagcaaatttgataaggcttctcaaacagctgtatgattctgcaggagtaatgtcacttgggatgcccgtggaaaaggcgcccttttaaccccaacatttattatgacctgggtaacaggcatattcagtgggaaaataccccagtcatcataaagccagtcccacatggcttgtatatgaagcatatcagttgcttcttctgggaatagttggaatcttattcttgagaagaattagaaacttatttctcaatagtgacactggtggaatagaataattttgtgataaagcatagtgacatattttcggactctaccatttgttatacagctgggattaaaaacctcatttattcaagagcaccatgactggttccattaggtagttaggacaatttgtaaataaaacaacaaaagatccacttagcatagtattatgctttttgcaggacacttttctgggtggacttggactaacccagttttccccactttctcacttgaacttctaaagcataaaagtagaatgtgctagaaatgtaacattctgagatagggagggactggccagaacagtgtggcctctgtttcagttcccacctaaaaacaggatgtatttcaatgctttagcccagcaagtcatatgccctggggtttaaaacccagagtaggctgccgggcggggtgcctcacgcctgtaatcccagcactttgggaggccaagatgggcggatcacctgagatcaggagtttgagaccagcctggccagcatggtgaaaccccgtctgtactaaaaatacaaaaattacctgggcatgttggtgggcgcctgtaatcccagctacttgggaggctgaggcaggagaagtgcttgaacccaggaagcggaggttgcagtgagccgagatcacgccactgcactccagcctgggcaacagagtggcgggctgctttctgcaatctttcagctgtgctgcaagtagggcactcatagtcaagactttatcagccctggggcagctttccttcctcttgggggaccagctcatagtgaatcctaagcttctgcctatctataagtgtattagtccgtcttcacgctgctgataaagacatacccgagactgggcaatttacaaaagaaaggacttgcagtttcacgtggctggtgaacgtctcacaatcacggcagagggtgaaaggtactccttaggtgcctgctgccagagagaatgaggaagaagcaaaaacaaaaacccctgataagcccatcagatctcgggagacttattaagcatcatgaaaatagcacgggaaagactggcccccgtgattcaattacctcctcctgggaccctcccacagcatgtgggaattccgggagatagaattcaagttgagatttgggtggggacacagccaaaccatatcaataggtaataaatctgcctcatgtaacttgtgtgcatgggtgttctatctcaccagactcatacaagctcgtaaccagtgcatgttaagcctgcttcacactcttcagcatgctttgctaaaaagtttttgccacgttaattttttaacattgcatgaatttgtagacataaaaatgagaaagcttactgaagacactctacatttgtttcatactcaatataatatttcttcttgagtataataagctacctagcttataagttaatatatttggataaaaaccaacttaaaaacttagctacatttctatgcaaactaatctttcatcaaagctaattagtgattttaaaatgctatcaaataccatcttatcttgtataagattttaaaatttggaagggtagctcaaaatcaatttgggttaattcaaattacatctcagaaactagagagttaaaataattttttaaaaggaactttatatattgccttaacactttgtgaataaaaatcttttatgtttttctcccttttatttatgatccttg
